(19) United States
(12) Patent Application Publication
(10) Pub. No.: US 2003/0092037 A1
(43) Pub. Date: May 15, 2003

(54) Elk1 phosphorylation related gene

(76) Inventors: Osamu Matsuzaki, Shizuoka (JP); Akio Matsuda, Shizuoka (JP); Yukiko Nagano, Shizuoka (JP); Naomi Suzuki, Shizuoka (JP)

Correspondence Address: BIRCH STEWART KOLASCH & BIRCH, PO BOX 747, FALLS CHURCH, VA, 22040-0747, US

(21) Appl. No.: 10/197,666

(22) Filed: Jul. 18, 2002

Related U.S. Application Data
(60) Provisional application No. 60/305,884, filed on Jul. 18, 2001.
(60) Provisional application No. 60/316,304, filed on Sep. 4, 2001.
(60) Provisional application No. 60/350,027, filed on Jan. 23, 2002.

(30) Foreign Application Priority Data
Jul. 18, 2001 (JP) 218204/2001
Aug. 31, 2001 (JP) 263450/2001
Jan. 21, 2002 (JP) 012176/2002

(51) Int. Cl. C12Q 1/68; C07H 21/04; C12N 9/12; C12N 9/16; C12P 21/02; C12N 5/06

(52) U.S. Cl. 435/6; 435/194; 435/196; 435/69.1; 435/320.1; 435/325; 536/23.2

(57) ABSTRACT

Proteins having MAP kinase cascade activity, which are used for diagnosing, treating or preventing diseases associated with the excessive activation or inhibition of MAP kinase cascade are provided. Using the plasmids pFR-Luc and pFA2-Elk1, the cDNA encoding a protein capable of activating MAP kinase cascade was cloned from the cDNA library constructed from human lung fibroblasts, and the DNA sequence and the deduced amino acid sequence were determined. The protein, the DNA encoding the protein, a recombinant vector containing the DNA, and a transformant containing the recombinant vector are useful for screening a substance inhibiting or promoting activation of MAP kinase cascade.

### TECHNICAL FIELD

[0001] The present invention relates to a protein capable of phosphorylating Elk1 and/or activating a kinase which phosphorylates Elk1, a DNA sequence encoding the protein, a recombinant vector containing the DNA, a transformant containing the recombinant vector, and an antibody which reacts with the protein. The present invention also relates to use of the protein, DNA molecule or antibody of the invention in the diagnosis, treatment or prevention of diseases associated with the excessive activation or inhibition of Elk1 phosphorylation action or a kinase which phosphorylates Elk1.

[0002] The present invention also relates to a method for screening a substance capable of inhibiting or activating Elk1 phosphorylation action and/or a kinase which phosphorylates Elk1 by using the protein, DNA, recombinant vector and transformant.

### BACKGROUND ART

[0003] MAP (mitogen-activated protein) kinase (MAPK) was first identified in the second half of the 1980s as a serine/threonine kinase which is activated with stimulation of insulin (Sturgill, T. W. et al., Biochim. Biophys. Acta 1092: 350-357 (1991)), various cell growth factors and tumor promoter (Nishida, E. et al., Int. Rev. Cytol. 138: 211-238 (1992)). Studies over the past 10 years revealed that MAP kinase was a principal constituent in intracellular signal transduction involved in determining the destiny and controlling the function of eukaryotes in response to extracellular stimuli. (Nishida, B et al., Trends Biochem. Sci., 18: 128-131 (1993), Marshall, C. J., Curr. Opin. Genet. Dev., 4: 82-89 (1994), Cobb. M. H. et al., J. Biol. Chem., 270: 14843-14846 (1995)). In particular, the elucidation of the signal transduction pathway which starts from cell growth factor receptors having tyrosine kinase activity, through adaptor molecules composed of SH2 (src homology 2) and SH3 (src homology 3), Ras (an oncogene product which is a GTP-binding protein), and Raf-1 (an oncogene product which is serine/threonine kinase) and leading to MAP kinase, and the understanding that this signal transduction pathway is central pathway for determining cell proliferation, differentiation and development of higher eukaryotic organisms, have been great achievements in the field of cell biology in the 1990s.

[0004] For signal transduction molecules, the most important point is the switching on and off of its activity. In this respect, MAP kinase possesses unique and interesting properties. That is, for the activation of MAP kinase, phosphorylation of T and Y within Thr-Glu-Tyr (TEY) sequence between kinase sub-domain VII and VIII is required. Identified as an enzyme for the phosphorylation of both these amino acid residues, is MAPK kinase (MAPKK) or MAPK/ERK kinase (MEK). MAPKK is therefore a dual-specificity kinase which can phosphorylate serine/threonine and tyrosine. Further, MAPKK, for its activation, requires phosphorylation of two serine (or threonine) residues between kinase domains VII and VIII. The serine/threonine kinase responsible for this phosphorylation is called MAPKK kinase (MAPKKK). Raf-1 is one example of MAPKKK, and the Ras→Raf-1 (=MAPKKK)→MAPKK→MAPK chain is one of the major signal transduction pathways. The cascade reaction consisting of three molecules, MAPKKK/MAPKK/MAPK is called the MAP kinase cascade.

[0005] Since the above-described Raf-1(MAPKKK)-MAPKK-MAP kinase signal transduction system was first identified in the MAP kinase cascade, it is frequently referred to as the classical MAP kinase pathway. Thereafter, it became clear that MAP kinase-like kinases exist. One example of such a kinase is a Stress-Activated Protein Kinase (SAPK). This enzyme was identified as a kinase which is activated when a cell is subjected to chemical stress such as protein synthesis inhibiting agents or physical stress such as heat shock or osmotic pressure changes (Kyriakis, J. M., Nature, 369: 156-160 (1994)). SAPK was later found to be identical to c-Jun N-terminal Kinase (JNK), which increases transcription activity by phosphorylating the N-terminus of transcription factor Jun, and was independently identified at the same time. (Derijard, B., Cell, 76: 1025-1037 (1994)). SAPK/JNK has homology to MAP kinase, but the TEY sequence necessary for activation in classical MAP kinase is TPY (Thr-Pro-Tyr). The mechanism whereby activation is effected by the Thr and Tyr of this sequence being phosphorylated by a single upstream kinase MAPKK is similar to that of classical MAP kinase. Today, the following two kinases are known as MAPKKs for SAPK/JNK. One type is SAPK/ERK kinase-1 (SEK1) or mitogen-activated protein kinase kinase 4 (MKK4) (Lin, A., et al., Science, 268: 286-290 (1995), Sanchez, I., Nature, 372: 794-798 (1994), Moriguchi, T., et al., J. Biol. Chem., 270: 12969-12972 (1995)). The other type is mitogen activated protein kinase kinase 7 (MKK7) (Moriguchi, T., et al, EMBO J., 16: 7045-7053 (1997), Tournier, C., et al, P.N.A.S., 94: 7337-7342 (1997), and others). That is, MAPKK operates as an upstream factor against classical MAP kinase, and novel MAP kinase is phosphorylated and activated specifically by another MAPKK. As an upstream MAPKKK on the pathway leading to SAPK/JNK, MEKK1 is known, but it is anticipated that there exist other kinases that operate as MAPKKK.

[0006] There is one other kinase analogous to MAP kinase which is simply called p38 based on its molecular weight. This kinase was identified and cloned as a protein which is subject to tyrosine phosphorylation in an early stage after stimulating a lymphocyte (Han, J., et al., Science, 265: 808-811(1994)). At around the same time, CSAID binding protein (CSBP) was identified as protein which binds to cytokine-suppressive anti-inflammatory drug (CSAID); a drug suppressing the production of inflammatory cytokines in lymphocytes (Lee, J. C., et al., Nature, 372: 739-746 (1994)). At present, this has been clarified to be a human form of p38. Further, this is also the same molecule as MPK2 which was independently isolated to be a kinase which is activated by stress stimulation. In p38/CSBP/MPK2, the above-mentioned TXY (X is a predetermined amino acid residue) sequence is TGY, and p38/CSBP/MPK2 is activated by phosphorylation of the Thr and Tyr by a single upstream kinase, MAPKK. As MAPKKs which activate p38, MKK3 and MKK6 operate specifically (Moriguchi, T., et al., J. Biol. Chem., 271: 26981-26988 (1996), Cuenda, A., et al,. EMBO J., 15: 4156-4164 (1996)).

[0007] There is mutual homology between the sequences of classical MAP kinase and SAPK/JNK, p38/CSBP/MPK2 and they constitute a superfamily. Similarly, the MAPKKs specific to each of these three also have mutual homology, and MKK1, MKK2, MKK3, MKK4, MKK6, MKK7, etc belong to this superfamily. (Kyriakis, J. M., et al., J. Biol. Chem., 271: 24313-24316 (1996), Davis, R. J., Trends Biochem. Sci., 19: 470-473 (1994)). In contrast, between further upstream MAPKKKs which phosphorylate and thereby activate each MAPKK, mutual sequence homology is relatively low. There is only about 30% homology even in the kinase domain between kinases having MAPKKK activity such as Raf, TAK1, MEKK, MLK3, Ask1, Mos, Cot, etc. This matches well with the adaptedness for purpose of a system which specifically activates a necessary MAP kinase signal transmission pathway in response to a great variety of stresses.

[0008] SAPK/JNK and p38/CSBP/MPK2 are not activated by growth factors which activate classical MAP kinase, and are each known to be activated by stresses such as osmotic shock or heat shock, or by inflammatory cytokines such as TNF-α or IL-1, etc. (Kyriakis., J. M., et al., J. Biol. Chem., 271: 24313-24316 (1996), Davis., R. J., Trends Biochem. Sci., 19: 470-473 (1994)) Further, they are activated under a condition which induces cell death, such as UV radiation and depletion of serum and/or growth factor(Kyriakis., J. M., et al., J. Biol. Chem., 271: 24313-24316 (1996), Davis., R. J., Trends Biochem. Sci., 19: 470-473 (1994)). Unlike classical MAP kinase which is activated by a signal induced from a tyrosine kinase-type receptor, the systems of SAPK/JNK and p38/CSBP/MPK2 are characterized by the extreme variety of entry points thereto.

[0009] As described above, it is known that MAP kinase cascades, particularly the SAPK/JNK and p38/CSBP/MPK2 systems, are activated by a variety of stimuli. From among these, we focused on the immediate activation of SAPK/JNK and p38/CSBP/MPK2 after stimulation by extracellular inflammatory cytokines. In other words, the MAP kinase cascade is predicted to be deeply involved in inflammation response in vivo. Along the pathway from an extracellular stimulus finally to the activation of SAPK/JNK or p38/CSBP/MPK2, there exist many MAPKK kinases and MAPK kinases, or groups of adaptor molecular which connect these, and these have not yet been fully clarified.

### DISCLOSURE OF THE INVENTION

[0010] The object of the present invention is to identify a new gene and protein such as described above acting to activate MAP kinase cascade, and to provide a method of use of them in medicaments, diagnostics and therapy. Kinases such as p38, JNK, and ERK which are furthermost downstream in the MAP kinase cascade, often phosphorylate Elk1 as a substrate. Therefore, a group of proteins which act to activate MAP kinase cascade were selected using ELK1 phosphorylation action and/or activation of a kinase which phosphorylates ELK1 as an indicator.

[0011] That is, the present invention provides a new protein capable of phosphorylating Elk1 and/or activating kinase which phosphorylates Elk1, a DNA sequence encoding the protein, a recombinant vector containing the DNA, a transformant containing the recombinant vector, a process for producing the protein, an antibody directed against the protein or a peptide fragment thereof, and a process for producing the antibody.

[0012] The present invention also provides a method for screening a substance capable of inhibiting or activating Elk1 phosphorylation action and/or kinase which phosphorylates Elk1, a kit for the screening, a substance capable of inhibiting or activating Elk1 phosphorylation action and/or kinase which phosphorylates Elk1 obtainable by the screening method or the screening kit, a process for producing the substance, a pharmaceutical composition containing a substance capable of inhibiting or activating Elk1 phosphorylation action and/or kinase which phosphorylates Elk1, etc.

[0013] Recently, random analysis of cDNA molecules has been intensively carried out to analyze various genes, which are expressed in vivo. The cDNA fragments thus obtained have been entered for databases and published as ESTs (Expressed Sequence Tags, e.g., http//www.ncbi.nlm.nih.gov/dbEST). However, ESTs are merely sequence information, and it is difficult to predict their functions. ESTs are also arranged in UniGene (http//www.ncbi.nlm.nih.gov/UniGene), and about 95,000 human ESTs have been registered until now. However, most of these ESTs have their 5′ end nucleotide sequences deleted, and contain no translation initiation site. Therefore it is unlikely that such analysis will directly lead to gene functional analysis such as the analysis of protein functions on the assumption of the determination of mRNA coding regions and the understanding of gene expression control by the analysis of promoters.

[0014] On the other hand, one method to elucidate functions of gene products (i.e., proteins) is transient expression cloning method using animal cells [see e.g., “Idenshi Kougaku Handbook (Genetic Engineering Handbook)”, an extra issue of “Jikken Igaku (Experimental Medicine)”, YODOSHA CO., LTD.]. This method involves transfecting animal cells with a cDNA library constructed using an animal cell expression vector to directly express a functional protein, and identifying and cloning the cDNA based on the biological activity of the protein having an effect on the cells. This method requires no chemical information (amino acid sequences and molecular weights) regarding the target protein product as a prerequisite, and allows the identification of cDNA clones by detecting specific biological activity of the protein expressed in the cells or culture.

[0015] For the efficient expression cloning, there is a need to devise a method of preparing a cDNA library. Several methods have been widely used to construct cDNA libraries [e.g., the method of Gubbler-Hoffman: Gene 25 (1983); and the method of Okayama-Berg: Mol. Cell. Biol. 2 (1982)]. However, most of the cDNA molecules prepared by these methods have their 5′ end nucleotide sequences deleted, and thus these methods rarely produce full-length cDNA, a complete DNA copy of mRNA. This is because the reverse transcriptase used to prepare cDNA from mRNA does not necessarily have sufficiently high efficiency to enable production of full-length cDNA. Therefore it is necessary to improve these prior art methods in order to efficiently carry out the above expression cloning.

[0016] In addition, in order to carry out the functional analysis of genes, it is essential to clone full-length cDNA sequences and express proteins having their full length amino acid sequence. Therefore, it has been necessary to construct cDNA libraries containing enriched full-length cDNA for efficient expression cloning.

[0017] The present inventors have intensively studied to solve the above problems. As a result, the present inventors have succeeded in constructing a full-length cDNA library by using the oligo-capping method; establishing a gene function assay system employing an expression cloning method using HEK293EBNA cells; and isolating a new DNA (cDNA) encoding a protein having a function of phosphorylating Elk1 and/or activating kinase which phosphorylates Elk1 by using the assay system. This new DNA molecule induced Elk1 phosphorylation action or kinase which phosphorylates Elk1 by its expression in HEK293EBNA cells. This result shows that this new DNA is a signal transduction molecule involved in Elk1 phosphorylation action and/or kinase which phosphorylates Elk1. Thus, the present invention has been completed.

[0018] That is, the present invention relates to:

[0019] (1) A purified protein selected from the group consisting of:

[0020] (a) a protein which consists of an amino acid sequence selected from the group consisting of SEQ ID NOS: 2, 4, 6, 8, 10, 12, 14, 16, 18, 20, 22, 24, 26, 28, 30, 32, 34, 36, 38, 40, 42, 44, 46, 48, 50, 52, 54, 56, 58, 60, 62, 64, 66, 68, 70, 72, 74, 76, 78, 80, 82, 84, 86, 88, 90, 92, 94, 96, 98, 100, 102, 104, 106, 108, 110, 112, 114, 116, 118, 120, 122, 124, 126, 128, 130, 132, 134, 136, 138, 140, 142, 144, 146, 148, 150, 152 and 154; and

[0021] (b) a protein that acts to phosphorylate Elk1 and/or activate kinase which phosphorylates Elk1 and consists of an amino acid sequence having at least one amino acid deletion, substitution or addition in an amino acid sequence selected from the group consisting of SEQ ID NOS: 2, 4, 6, 8, 10, 12, 14, 16, 18, 20, 22, 24, 26, 28, 30, 32, 34, 36, 38, 40, 42, 44, 46, 48, 50, 52, 54, 56, 58, 60, 62, 64, 66, 68, 70, 72, 74, 76, 78, 80, 82, 84, 86, 88, 90, 92, 94, 96, 98, 100, 102, 104, 106, 108, 110, 112, 114, 116, 118, 120, 122, 124, 126, 128, 130, 132, 134, 136, 138, 140, 142, 144, 146, 148, 150, 152 and 154.

[0022] (2) A purified protein that acts to phosphorylate Elk1 and/or activate kinase which phosphorylates Elk1 and comprises an amino acid sequence having at least 95% identity to the protein according to above item (1) over the entire length thereof.

[0023] The proteins of (1) and (2) are preferably purified and isolated proteins.

[0024] (3) An isolated polynucleotide which comprises a nucleotide sequence encoding a protein selected from the group consisting of:

[0025] (a) a protein which comprises an amino acid sequence selected from the group consisting of SEQ ID NOS: 2, 4, 6, 8, 10, 12, 14, 16, 18, 20, 22, 24, 26, 28, 30, 32, 34, 36, 38, 40, 42, 44, 46, 48, 50, 52, 54, 56, 58, 60, 62, 64, 66, 68, 70, 72, 74, 76, 78, 80, 82, 84, 86, 88, 90, 92, 94, 96, 98, 100, 102, 104, 106, 108, 110, 112, 114, 116, 118, 120, 122, 124, 126, 128, 130, 132, 134, 136, 138, 140, 142, 144, 146, 148, 150, 152 and 154; and

[0026] (b) a protein that acts to phosphorylate Elk1 and/or activate a kinase which phosphorylates Elk1, and consists of an amino acid sequence having at least one amino acid deletion, substitution or addition in an amino acid sequence selected from the group consisting of SEQ ID NOS: 2, 4, 6, 8, 10, 12, 14, 16, 18, 20, 22, 24, 26, 28, 30, 32, 34, 36, 38, 40, 42, 44, 46, 48, 50, 52, 54, 56, 58, 60, 62, 64, 66, 68, 70, 72, 74, 76, 78, 80, 82, 84, 86, 88, 90, 92, 94, 96, 98, 100, 102, 104, 106, 108, 110, 112, 114, 116, 118, 120, 122, 124, 126, 128, 130, 132, 134, 136, 138, 140, 142, 144, 146, 148, 150, 152 and 154.

[0027] (4) An isolated polynucleotide comprising a polynucleotide sequence selected from the group consisting of:

[0028] (a) a polynucleotide sequence represented by SEQ ID NOS: 1, 3, 5, 7, 9, 11, 13, 15, 17, 19, 21, 23, 25, 27, 29, 31, 33, 35, 37, 39, 41, 43, 45, 47, 49, 51, 53, 55, 57, 59, 61, 63, 65, 67, 69, 71, 73, 75, 77, 79, 81, 83, 85, 87, 89, 91, 93, 95, 97, 99, 101, 103, 105, 107, 109, 111, 113, 115, 117, 119, 121, 123, 125, 127, 129, 131, 133, 135, 137, 139, 141, 143, 145, 147, 149, 151 and 153; and a polynucleotide sequence complementary to said polynucleotide sequence,

[0029] (b) a polynucleotide sequence which encodes a protein that acts to phosphorylate Elk1 and/or activate kinase which phosphorylates Elk1, and which hybridizes under stringent conditions with a polynulceotide having a polynulceotide sequence complementary to the polynucleotide sequence of (a); and,

[0030] (c) a polynucleotide sequence encoding a protein that acts to phosphorylate Elk1 and/or activate a kinase which phosphorylates Elk1, and consists of a nucleotide sequence having at least one nucleotide deletion, substitution or addition in a nucleotide sequence selected from the group consisting of SEQ ID NOS: 1, 3, 5, 7, 9, 11, 13, 15, 17, 19, 21, 23, 25, 27, 29, 31, 33, 35, 37, 39, 41, 43, 45, 47, 49, 51, 53, 55, 57, 59, 61, 63, 65, 67, 69, 71, 73, 75, 77, 79, 81, 83, 85, 87, 89, 91, 93, 95, 97, 99, 101, 103, 105, 107, 109, 111, 113, 115, 117, 119, 121, 123, 125, 127, 129, 131, 133, 135, 137, 139, 141, 143, 145, 147, 149, 151 and 153.

[0031] (5) An isolated polynucleotide comprising a nucleotide sequence which encodes a protein that acts to phosphorylate Elk1 and/or activate a kinase which phosphorylates Elk1, and has at least 95% identity to the polynucleotide sequence according to above item (3) over the entire length thereof.

[0032] (6) An isolated polynucleotide comprising a nucleotide sequence which encodes a protein that acts to phosphorylate Elk1 and/or activate a kinase which phosphorylates Elk1, and has at least 95% identity to the polynucleotide sequence according to above item (4) over the entire length thereof.

[0033] (7) A purified encoded by the polynucleotide according to any one of above items (3) to (6). The protein is preferably a purified and isolated protein.

[0034] (8) A recombinant vector which comprises a polynucleotide according to any one of above items (3) to (6).

[0035] (9) A transformed cell which comprises the recombinant vector according to above item (8).

[0036] (10) A membrane of the cell according to above item (9), when the protein according to above item (1), (2) or (7) is a membrane protein.

[0037] (11) A process for producing a protein comprising:

[0038] (a) culturing a transformed cell comprising the isolated polynucleotide according to any one of items (3) to (6) under conditions providing expression of the encoded protein; and

[0039] (b) recovering the protein from the culture.

[0040] (12) A process for diagnosing a disease or a susceptibility to a disease in a subject related to expression or activity of the protein of item (1), (2) or (7) in a subject comprising:

[0041] (a) determining the presence or absence of a mutation in the nucleotide sequence encoding said protein in the genome of said subject; and/or

[0042] (b) analyzing the amount of expression of said protein in a sample derived from said subject.

[0043] (13) A method for screening a compound for inhibiting or promoting activity for Elk1 phosphorylation action and/or kinase which phosphorylates Elk1, which comprises the steps of:

[0044] (a) providing a cell with a gene encoding a protein that acts to phosphorylate Elk1 and/or activate a kinase which phosphorylates Elk1, and a component that provides a detectable signal associated with Elk1 phosphorylation action or kinase which phosphorylates Elk1;

[0045] (b) culturing the transformed cell under conditions, which permit the expression of the gene in the transformed cell;

[0046] (c) contacting the transformed cell with one or more compounds;

[0047] (d) measuring the detectable signal; and

[0048] (e) isolating or identifying a compound as an activator compound and/or an inhibitor compound according to the measurement of the detectable signal;

[0049] (14) A process for producing a pharmaceutical composition, which comprises the steps of:

[0050] (a) providing a cell with a gene encoding a protein that acts to phosphorylate Elk1 and/or activate kinase which phosphorylates Elk1, and a component capable of providing a detectable signal;

[0051] (b) culturing a transformed cell under conditions, which permit the expression of the gene in the transformed cell;

[0052] (c) contacting the transformed cell with one or more candidate compounds;

[0053] (d) measuring the detectable signal;

[0054] (e) isolating or identifying a compound as an activator compound and/or an inhibitor compound according to the measurement of the detectable signal; and

[0055] (f) optimizing the isolated or identified compound for a pharmaceutical composition.

[0056] (15) A kit for screening a compound for inhibiting or promoting activity for Elk1 phosphorylation action and/or a kinase which phosphorylates Elk1, which comprises:

[0057] (a) a cell transformed with a gene encoding a protein that acts to phosphorylate Elk1 and/or activate a kinase which phosphorylates Elk1, and a component that provides a detectable signal upon activation of Elk1 phosphorylation action and/or kinase which phosphorylates Elk1; and

[0058] (b) reagents for measuring the detectable signal.

[0059] (16) A monoclonal or polyclonal antibody that reacts with the protein according to above item (1), (2)or (7).

[0060] (17) A process for producing a monoclonal or polyclonal antibody that reacts with the protein of above item (1), (2) or (7), which comprises administering the protein according to above item (1), (2) or (7) as an antigen or epitope-bearing fragments to a non-human animal.

[0061] (18) An antisense oligonucleotide complementary to at least a part of the polynucleotide according to any one of above items (3) to (6), which prevents expression of a protein which phosphorylate Elk1 and/or activates kinase which phosphorylates Elk1.

[0062] (19) A ribozyme which inhibits activation of Elk1 phosphorylation action and/or a kinase which phosphorylates Elk1 by cleavage of RNA that encodes the protein of above item (1), (2) or (7).

[0063] (20) A method for treating a disease, which comprises administering to a subject an effective amount of a compound screened by the process according to above item (13), and/or a monoclonal or polyclonal antibody according to above item (16), and/or an antisense oligonucleotide according to above item (18), and/or a ribozyme according to above item (19) for treating a disease selected from the group consisting of inflammation, autoimmune diseases, cancers, viral infections, GVHD, skin diseases, IgA nephritis, purpuric nephritis, proliferative nephritides, and fulminant hepatitis.

[0064] (21) A pharmaceutical composition produced according to item (14) for inhibiting or promoting Elk1 phosphorylation action or a kinase which phosphorylates Elk1.

[0065] (22) A pharmaceutical composition according to item (21) for the treatment of inflammation, autoimmune diseases, cancers, viral infections, GVHD, skin diseases, IgA nephritis, purpuric nephritis, proliferative nephritides, and/or fulminant hepatitis.

[0066] (23) A method of treating inflammation, autoimmune diseases, cancers, viral infections, GVHD, skin diseases, IgA nephritis, purpuric nephritis, proliferative nephritides, and/or fulminant hepatitis, which comprising administering a pharmaceutical composition produced according to above item (14) to a patient suffering from a disease relating to abnormalities in Elk1 phosphorylation action or kinase which phosphorylates Elk1.

[0067] (24) A pharmaceutical composition which comprises a monoclonal or polyclonal antibody according to item (16)as an active ingredient.

[0068] (25) A pharmaceutical composition which comprises an antisense oligonucleotide according to item (18) as an active ingredient.

[0069] (26) A pharmaceutical composition according to item (24) or (25), wherein a target disease is selected from the group consisting of inflammation, autoimmune diseases, cancers, viral infections, GVHD, skin diseases, IgA nephritis, purpuric nephritis, proliferative nephritides, and fulminant hepatitis.

[0070] (27) A computer-readable medium on which a sequence data set has been stored, said sequence data set comprising at least one nucleotide sequence selected from the group consisting of SEQ ID NOS: 1, 3, 5, 7, 9, 11, 13, 15, 17, 19, 21, 23, 25, 27, 29, 31, 33, 35, 37, 39, 41, 43, 45, 47, 49, 51, 53, 55, 57, 59, 61, 63, 65, 67, 69, 71, 73, 75, 77, 79, 81, 83, 85, 87, 89, 91, 93, 95, 97, 99, 101, 103, 105, 107, 109, 111, 113, 115, 117, 119, 121, 123, 125, 127, 129, 131, 133, 135, 137, 139, 141, 143, 145, 147, 149, 151 and 153 and/or at least one amino acid sequence selected from the group consisting of SEQ ID NOS: 2, 4, 6, 8, 10, 12, 14, 16, 18, 20, 22, 24, 26, 28, 30, 32, 34, 36, 38, 40, 42, 44, 46, 48, 50, 52, 54, 56, 58, 60, 62, 64, 66, 68, 70, 72, 74, 76, 78, 80, 82, 84, 86, 88, 90, 92, 94, 96, 98, 100, 102, 104, 106, 108, 110, 112, 114, 116, 118, 120, 122, 124, 126, 128, 130, 132, 134, 136, 138, 140, 142, 144, 146, 148, 150, 152 and 154.

[0071] (28) A method for calculating identity to other nucleotide sequences and/or amino acid sequences, which comprises comparing data on the medium according to above item (27) with data of said other nucleotide sequences and/or amino acid sequences.

[0072] (29) An insoluble substrate to which polynucleotide comprising all or part of the nucleotide sequences selected from the group consisting of SEQ ID NOS: 1, 3, 5, 7, 9, 11, 13, 15, 17, 19, 21, 23, 25, 27, 29, 31, 33, 35, 37, 39, 41, 43, 45, 47, 49, 51, 53, 55, 57, 59, 61, 63, 65, 67, 69, 71, 73, 75, 77, 79, 81, 83, 85, 87, 89, 91, 93, 95, 97, 99, 101, 103, 105, 107, 109, 111, 113, 115, 117, 119, 121, 123, 125, 127, 129, 131, 133, 135, 137, 139, 141, 143, 145, 147, 149, 151 and 153 are fixed.

[0073] (30) An insoluble substrate to which polypeptides comprising all or a part of the amino acid sequences selected from the group consisting of SEQ ID NOS: 2, 4, 6, 8, 10, 12, 14, 16, 18, 20, 22, 24, 26, 28, 30, 32, 34, 36, 38, 40, 42, 44, 46, 48, 50, 52, 54, 56, 58, 60, 62, 64, 66, 68, 70, 72, 74, 76, 78, 80, 82, 84, 86, 88, 90, 92, 94, 96, 98, 100, 102, 104, 106, 108, 110, 112, 114, 116, 118, 120, 122, 124, 126, 128, 130, 132, 134, 136, 138, 140, 142, 144, 146, 148, 150, 152 and 154 are fixed.

### BRIEF DESCRIPTION OF THE DRAWINGS

[0074] FIG. 1 is a graph showing MAP kinase cascade reporter activity inhibition by p38 inhibitor SB203580 in Example 3, the axis of abscissa is SB203580 concentration and the transversal axis is relative luciferase activity.

[0075] FIG. 2 indicates the structural formula of staurosporine.

### EXPLANATION OF THE SEQUENCE LISTING

[0076] SEQ ID NO: 155 and SEQ ID NO: 156 are primers.

### BEST MODE FOR CARRYING OUT THE INVENTION

[0077] At first, in order to further clarify the basic feature of the present invention, the present invention is explained by following how the present invention is completed. In order to obtain a new gene having a function of activating MAP kinase cascade, the following experiments were carried out as shown in the examples. First, using the oligo-capping method, a full-length cDNA was produced from mRNA prepared from normal human lung fibroblasts (purchased from Sanko Junyaku Co., Ltd.), and a full-length cDNA library was constructed in which the cDNA was inserted into the vector pME18S-FL3 (GenBank Accession AB009864). Next, the cDNA library was introduced into E. coli cells, and plasmid preparation was carried out per clone. Then, animal cell expression plasmid pcDNA3.1 (INVITROGEN) comprising DNA encoding human JNK gene, animal cell expression plasmid pcDNA3.1 (INVITROGEN) comprising DNA encoding human p38 gene, plasmid pFA2-Elk1 (STRATAGENE) comprising DNA encoding a fusion protein of part of Elk1 being a substrate of these and GAL4DNA binding region, and reporter plasmid pFR-Luc (STRATAGENE) having a Gal4 recognition site upstream of a gene encoding luciferase were cotransfected with the above full-length cDNA plasmid into HEK293EBNA cells (INVITROGEN). After 24 hours of culture, luciferase activity was measured, and the plasmid with significantly increased luciferase activity compared to that of a control experiment (vector pME18S-FL3 is introduced into a cell in place of a full-length cDNA)was selected (the selected plasmid showed a 5-fold or more increase in luciferase activity compared to that of the control experiment), and the entire nucleotide sequence of the cDNA cloned into the plasmid was determined. As discussed above, since p38, JNK, and ERK etc, existing furthermost downstream of MAP kinase cascade, phosphorylate Elk1 as a good substrate, signal transduction molecules involved in the activation Elk1 phosphorylation action and/or a kinase which phosphorylates Elk1, are highly likely to be signal transduction molecules which activate the MAP kinase cascade. Therefore, the protein encoded by the cDNA thus obtained is a signal molecule involved in the phosphorylation of Elk1 and/or a kinase which phosphorylates Elk1, and at the same time, can be expected to be a signal transduction molecule involved in the activation of the MAP kinase cascade.

[0078] The phrase “activate kinase which phosphorylates Elk1” includes both direct modification and activation of a kinase which phosphorylates Elk1, and indirect activation of the kinase by activating upstream signal(s).

[0079] The present invention is described in detail below.

[0080] In the present invention, the words “acts to phosphorylate Elk1” or “acts to activate a kinase which phosphorylates Elk1” refers to having an action which phosphorylates Elk1 directly or indirectly when a gene is introduced into a suitable cell and the protein encoded by the gene is excessively expressed. Phosphorylation of Elk1 can be measured, for example, by a reporter gene assay comprising cotransfecting into a cell together with a gene resulting from fusion of Elk1 and GAL4DNA binding region, a reporter gene wherein a luciferase gene is linked downstream of a GAL4 recognition sequence. In the assay, phosphorylation can be evaluated by an increase in reporter activity in cells into which the gene was introduced, compared to control cells (cells into which a null vector only was introduced). Increase in reporter activity is preferably by a factor of 1.5 or more, more preferably by a factor of 2 or more, and still more preferably by a factor of 5 or more.

[0081] Reporter activity can be measured by cloning a polynucleotide (e.g. cDNA) encoding the protein to be expressed into a suitable expression vector, co-transfecting the thus prepared expression vector into a suitable cell together with a gene resulting from fusion of Elk1 and GAL4DNA binding region, and a reporter gene wherein a luciferase gene is linked downstream of a GAL4 recognition sequence, and after culturing for a certain period, then measuring the reporter activity. Suitable expression vectors are well known to those skilled in the art, and examples include pME18S-FL3, pcDNA3.1 (Invitrogen). The reporter gene can be one which enables a person skilled in the art to easily detect the expression thereof, and examples include a gene encoding luciferase, chloramphenicol acetyl transferase, or β-galactosidase. Use of a gene encoding luciferase is most preferable, and examples of a gene resulting from fusion of Elk1 and GAL4DNA binding region include pFA2-Elk1 (STRATAGENE), and examples of a reporter gene wherein a luciferase gene is linked downstream of a GAL4 recognition sequence include pFR-Luc (STRATAGENE). Suitable cells include cells which exhibit an MAPK cascade activation response to stimulation by IL-1, TNF-α or the like. Examples include 293-EBNA cells. Cell culture and introduction of genes into cells (transfection) can be performed and optimized by a person skilled in the art by known techniques.

[0082] As a preferable method, 293-EBNA cells are inoculated on 5% FBS (Fetal Bovine Serum)-containing DMEM (Dulbecco's Modified Eagle Medium) medium in a 96-well cell culture plate to a final cell density of 1×10⁴ cells/well, and cultured for 24 hours at 37° C., in the presence of 5% CO₂. Then, pFR-Luc (STRATAGENE), pFA2-Elk1 (STRATAGENE), pcDNA3.1 (+) (INVITROGEN) into which human p38 gene has been incorporated, pcDNA3.1 (+) (INVITROGEN) into which human JNJ1 β 1 gene has been incorporated, and the expression vector are co-transfected into the cells in a well using FuGENE 6 (Roche). After 24 hours of culture at 37° C., phosphorylation of Elk1 or activation of a kinase that phosphorylates Elk1 is then measured by measuring luciferase activity using a long term luciferase assay system, Picagene LT2.0 (Toyo Ink). For example, luciferase activity can be measured using PerkinElmer's Wallac ARVOTMST 1420 MULTILABEL COUNTER. The method for gene introduction by FuGENE6, and measurement of luciferase activity by Picagene LT2.0 can be performed respectively according to the attached protocols. In a method of gene introduction with a 96-well plate using FuGENE6, the amount of FuGENE6 per 1 well is suitably 0.3 to 0.5 μl, preferably 0.5 μl. The respective amounts per 1 well of the plasmid genes to be introduced are: pFR-Luc plasmid amount, 50 to 100 ng, preferably 60 ng; pFA2-Elk1 plasmid amount, 0.1 to 0.5 ng, preferably 0.25 ng; amount of pcDNA3.1 (+) plasmid into which human p38 gene has been incorporated, 5 ng; and amount of pcDNA3.1(+) plasmid into which human JNJ1 β 1 gene has been incorporated, 30 ng. An ability to phosphorylate Elk1 or to activate a kinase that phosphorylates Elk1 refers to an ability to increase the reporter activity (luciferase activity) relative to the control experiment (using cells into which a null vector only was introduced). Increase in reporter activity is preferably by a factor of 1.5 or more, more preferably by a factor of 2 or more, and still more preferably by a factor of 5 or more.

[0083] Related to the amino acid sequences of SEQ ID NOS. 2, 4, 6, 8, 10, 12, 14, 16, 18, 20, 22, 24, 26, 28, 30, 32, 34, 36, 38, 40, 42, 44, 46, 48, 50, 52, 54, 56, 58, 60, 62, 64, 66, 68, 70, 72, 74, 76, 78, 80, 82, 84, 86, 88, 90, 92, 94, 96, 98, 100, 102, 104, 106, 108, 110, 112, 114, 116, 118, 120, 122, 124, 126, 128, 130, 132, 134, 136, 138, 140, 142, 144, 146, 148, 150, 152 and 154, the present invention provides for a protein that:

[0084] (a) comprises any one of the above amino acid sequence;

[0085] (b) is a polypeptide having one of the above amino acid sequences;

[0086] (c) phosphorylates Elk1 and/or activates kinase which phosphorylates Elk1 and consists of an amino acid sequence having at least one amino acid, preferably several amino acids deletion, substitution or addition in any one of the above amino acid sequences; and

[0087] (d) comprises an amino acid sequence, which has at least 95% identity, preferably at least 97-99% identity, to any one of the amino acid sequences of SEQ ID NOS. 2, 4, 6, 8, 10, 12, 14, 16, 18, 20, 22, 24, 26, 28, 30, 32, 34, 36, 38, 40, 42, 44, 46, 48, 50, 52, 54, 56, 58, 60, 62, 64, 66, 68, 70, 72, 74, 76, 78, 80, 82, 84, 86, 88, 90, 92, 94, 96, 98, 100, 102, 104, 106, 108, 110, 112, 114, 116, 118, 120, 122, 124, 126, 128, 130, 132, 134, 136, 138, 140, 142, 144, 146, 148, 150, 152 and 154, over the entire length thereof.

[0088] “Identity” as known in the art, is a relationship between two or more protein sequence or two or more polynucleotide sequences, as determined by comparing the sequences. In the art, “identity” also means the degree of sequence relatedness between protein or polynucleotide sequences, as determined by the match between protein or polynucleotide sequences, as the case may be, as determined by the match between strings of such sequences. “Identity” and “similarity” can be readily calculated by known methods. Preferred methods to determine identity are designed to give the largest match between the sequences tested. Methods to determine identity and similarity are codified in publicly available computer programs. “Identity” can be determined by using, for example, the BLAST (Basic Local Alignment Search Tool) program (for example, Altschul S F, Gish W, Miller W, Myers E W, Lipman D J., J. Mol. Biol., 215: p403-410(1990), Altschul S F, Madden T L, Schaffer A A, Zhang Z, Miller W, Lipman D J,. Nucleic Acids Res. 25: p3389-3402 81997), however methods of determining identity are not limited to this. Where software such as BLAST is used, it is preferable to use default values.

[0089] The main initial conditions generally used in a BLAST search are as follows, but are not limited to these. An amino acid substitution matrix is a matrix numerically representing the degree of analogy of each pairing of each of the 20 types of amino acid, and normally the default matrix, BLOSUM62, is used. The theory of this amino acids substitution matrix is shown in Altschul S. F., J. Mol. Biol. 219: 555-565 (1991), and its applicability to DNA sequence comparison is shown in States D. J., Gish W., Altschul S. F., Methods, 3: 66-70 (1991). In this case, optimal gap cost is determined empirically and in the case of BLOSUM62, preferably parameters, Existence 11, Extension 1 are used.

[0090] The expected value (EXPECT) is the threshold value concerning statistical significance for a match with a database sequence, and the default value is 10.

[0091] The Examples described below demonstrate that the protein consisting of any one of the amino acid sequences of the above SEQ ID NOS: 2, 4, 6, 8, 10, 12, 14, 16, 18, 20, 22, 24, 26, 28, 30, 32, 34, 36, 38, 40, 42, 44, 46, 48, 50, 52, 54, 56, 58, 60, 62, 64, 66, 68, 70, 72, 74, 76, 78, 80, 82, 84, 86, 88, 90, 92, 94, 96, 98, 100, 102, 104, 106, 108, 110, 112, 114, 116, 118, 120, 122, 124, 126, 128, 130, 132, 134, 136, 138, 140, 142, 144, 146, 148, 150, 152 and 154, is capable of phosphorylating Elk1 action and/or activating kinase which phosphorylates Elk1.

[0092] Related to the polynucleotide sequences of SEQ ID NOS: 1, 3, 5, 7, 9, 11, 13, 15, 17, 19, 21, 23, 25, 27, 29, 31, 33, 35, 37, 39, 41, 43, 45, 47, 49, 51, 53, 55, 57, 59, 61, 63, 65, 67, 69, 71, 73, 75, 77, 79, 81, 83, 85, 87, 89, 91, 93, 95, 97, 99, 101, 103, 105, 107, 109, 111, 113, 115, 117, 119, 121, 123, 125, 127, 129, 131, 133, 135, 137, 139, 141, 143, 145, 147, 149, 151 and 153, the present invention further provides an isolated polynucleotide that:

[0093] (a) comprises a nucleotide sequence, which has at least 95% identity, preferably at least 97-99% identity to any one of the above sequences;

[0094] (b) has a polynucleotide sequence encoding a protein which has at least 97-99% identity, to any one of the amino acid sequences of SEQ ID NOS: 2, 4, 6, 8, 10, 12, 14, 16, 18, 20, 22, 24, 26, 28, 30, 32, 34, 36, 38, 40, 42, 44, 46, 48, 50, 52, 54, 56, 58, 60, 62, 64, 66, 68, 70, 72, 74, 76, 78, 80, 82, 84, 86, 88, 90, 92, 94, 96, 98, 100, 102, 104, 106, 108, 110, 112, 114, 116, 118, 120, 122, 124, 126, 128, 130, 132, 134, 136, 138, 140, 142, 144, 146, 148, 150, 152 and 154.

[0095] Polynucleotides which are identical or almost identical to a nucleotide sequences contained in the above nucleotide sequence may be used as hybridization probes or as primers for a nucleic acid amplification reaction to isolate full-length cDNAs and genomic clones encoding proteins of the present invention or cDNA and genomic clones of other genes that have a high sequence similarity to the above sequences. Typically, these nucleotide sequences are 70% identical, preferably 80% identical, more preferably 90% identical, most preferably 95% identical to the above sequences. The probes or primers will generally comprises at least 15 nucleotides, preferably 30 nucleotides and may have 50 nucleotides. Particularly preferred probes will have between 30 and 50 nucleotides. Particularly preferred primers have between 20 and 25 nucleotides.

[0096] The polynucleotide of the present invention may be either in the form of a DNA such as cDNA, a genomic DNA obtained by cloning or synthetically produced, or may be in the form of RNA such as mRNA. The polynucleotide may be single-stranded or double-stranded. The double-stranded polynucleotides may be double-stranded DNA, double-stranded RNA or DNA:RNA hybrid. The single-stranded polynucleotide may be sense strand also known as coding strand or antisense strand also known as non-coding strand.

[0097] Those skilled in the art can prepare a protein having the same Elk1 phosphorylating activity and/or kinase activity which phosphorylates Elk1 as the protein having an amino acid sequence of any one of SEQ ID NOS 2, 4, 6, 8, 10, 12, 14, 16, 18, 20, 22, 24, 26, 28, 30, 32, 34, 36, 38, 40, 42, 44, 46, 48, 50, 52, 54, 56, 58, 60, 62, 64, 66, 68, 70, 72, 74, 76, 78, 80, 82, 84, 86, 88, 90, 92, 94, 96, 98, 100, 102, 104, 106, 108, 110, 112, 114, 116, 118, 120, 122, 124, 126, 128, 130, 132, 134, 136, 138, 140, 142, 144, 146, 148, 150, 152 and 154, by means of appropriate substitution of an amino acid in the protein using known methods. One such method involves conventional mutagenesis procedures using mutagens for the DNA encoding the protein. Another method is, for example, site-directed mutagenesis (e.g., Mutan-Super Express Km Kit from Takara Shuzo Co., Ltd.). Mutations of amino acids in proteins may also occur in nature. Thus, the present invention also includes a mutated protein which is capable of phosphorylating Elk1 and/or activating kinase which phosphorylates Elk1 and which has at least one amino acid deletion, substitution or addition compared to the corresponding amino acid sequence of SEQ ID NO 2, 4, 6, 8, 10, 12, 14, 16, 18, 20, 22, 24, 26, 28, 30, 32, 34, 36, 38, 40, 42, 44, 46, 48, 50, 52, 54, 56, 58, 60, 62, 64, 66, 68, 70, 72, 74, 76, 78, 80, 82, 84, 86, 88, 90, 92, 94, 96, 98, 100, 102, 104, 106, 108, 110, 112, 114, 116, 118, 120, 122, 124, 126, 128, 130, 132, 134, 136, 138, 140, 142, 144, 146, 148, 150, 152 or 154. The number of mutations is preferably up to 10, more preferably up to 5, most preferably up to 3.

[0098] Examples of such amino acid substitutions include substitutions within the following groups: (glycine, alanine), (valine, isoleucine, leucine), (aspartic acid, glutamic acid), (asparagine, glutamine), (serine, threonine), (lysine, arginine) and (phenylalanine, tyrosine).

[0099] Based on a nucleotide sequence (e.g., SEQ ID NO: 1, 3, 5, 7, 9, 11, 13, 15, 17, 19, 21, 23, 25, 27, 29, 31, 33, 35, 37, 39, 41, 43, 45, 47, 49, 51, 53, 55, 57, 59, 61, 63, 65, 67, 69, 71, 73, 75, 77, 79, 81, 83, 85, 87, 89, 91, 93, 95, 97, 99, 101, 103, 105, 107, 109, 111, 113, 115, 117, 119, 121, 123, 125, 127, 129, 131, 133, 135, 137, 139, 141, 143, 145, 147, 149, 151 or 153) encoding a protein consisting of an amino acid sequence of SEQ ID NO: 2, 4, 6, 8, 10, 12, 14, 16, 18, 20, 22, 24, 26, 28, 30, 32, 34, 36, 38, 40, 42, 44, 46, 48, 50, 52, 54, 56, 58, 60, 62, 64, 66, 68, 70, 72, 74, 76, 78, 80, 82, 84, 86, 88, 90, 92, 94, 96, 98, 100, 102, 104, 106, 108, 110, 112, 114, 116, 118, 120, 122, 124, 126, 128, 130, 132, 134, 136, 138, 140, 142, 144, 146, 148, 150, 152 or 154, or fragments thereof, those skilled in the art can routinely isolate a DNA with a high sequence similarity to any one of these nucleotide sequences by using hybridization techniques and the like, and obtain proteins having the same Elk1 phosphorylating activity and/or kinase activity which phosphorylates Elk1 as the protein having an amino acid sequence of SEQ ID NOS 2, 4, 6, 8, 10, 12, 14, 16, 18, 20, 22, 24, 26, 28, 30, 32, 34, 36, 38, 40, 42, 44, 46, 48, 50, 52, 54, 56, 58, 60, 62, 64, 66, 68, 70, 72, 74, 76, 78, 80, 82, 84, 86, 88, 90, 92, 94, 96, 98, 100, 102, 104, 106, 108, 110, 112, 114, 116, 118, 120, 122, 124, 126, 128, 130, 132, 134, 136, 138, 140, 142, 144, 146, 148, 150, 152 or 154. Thus, the present invention also includes a protein that phosphorylates Elk1 and/or activates kinase which phosphorylates Elk1 and comprises an amino acid sequence having a high identity to the amino acid sequence of above SEQ ID NO: 2, 4, 6, 8, 10, 12, 14, 16, 18, 20, 22, 24, 26, 28, 30, 32, 34, 36, 38, 40, 42, 44, 46, 48, 50, 52, 54, 56, 58, 60, 62, 64, 66, 68, 70, 72, 74, 76, 78, 80, 82, 84, 86, 88, 90, 92, 94, 96, 98, 100, 102, 104, 106, 108, 110, 112, 114, 116, 118, 120, 122, 124, 126, 128, 130, 132, 134, 136, 138, 140, 142, 144, 146, 148, 150, 152 or 154. “High identity” refers to an amino acid sequence having an identity of at least 90%, preferably at least 97-99% over the entire length of any one of the above SEQ ID NOS: 2, 4, 6, 8, 10, 12, 14, 16, 18, 20, 22, 24, 26, 28, 30, 32, 34, 36, 38, 40, 42, 44, 46, 48, 50, 52, 54, 56, 58, 60, 62, 64, 66, 68, 70, 72, 74, 76, 78, 80, 82, 84, 86, 88, 90, 92, 94, 96, 98, 100, 102, 104, 106, 108, 110, 112, 114, 116, 118, 120, 122, 124, 126, 128, 130, 132, 134, 136, 138, 140, 142, 144, 146, 148, 150, 152 and 154.

[0100] The proteins of the present invention may be natural proteins derived from any human or animal cells or tissues, chemically synthesized proteins, or proteins obtained by genetic recombination techniques. The protein may or may not be subjected to post-translational modifications such as sugar chain addition or phosphorylation.

[0101] The present invention also includes a polynucleotide encoding the above protein of the present invention. Examples of nucleotide sequences encoding a protein consisting of an amino acid sequence of SEQ ID NO: 2, 4, 6, 8, 10, 12, 14, 16, 18, 20, 22, 24, 26, 28, 30, 32, 34, 36, 38, 40, 42, 44, 46, 48, 50, 52, 54, 56, 58, 60, 62, 64, 66, 68, 70, 72, 74, 76, 78, 80, 82, 84, 86, 88, 90, 92, 94, 96, 98, 100, 102, 104, 106, 108, 110, 112, 114, 116, 118, 120, 122, 124, 126, 128, 130, 132, 134, 136, 138, 140, 142, 144, 146, 148, 150, 152 or 154 include a nucleotide sequences of SEQ ID NO: 1, 3, 5, 7, 9, 11, 13, 15, 17, 19, 21, 23, 25, 27, 29, 31, 33, 35, 37, 39, 41, 43, 45, 47, 49, 51, 53, 55, 57, 59, 61, 63, 65, 67, 69, 71, 73, 75, 77, 79, 81, 83, 85, 87, 89, 91, 93, 95, 97, 99, 101, 103, 105, 107, 109, 111, 113, 115, 117, 119, 121, 123, 125, 127, 129, 131, 133, 135, 137, 139, 141, 143, 145, 147, 149, 151 or 153. The DNA includes cDNA, genomic DNA, and chemically synthesized DNA. In accordance with the degeneracy of the genetic code, at least one nucleotide in the nucleotide sequence encoding a protein consisting of an amino acid sequence of SEQ ID NO: 2, 4, 6, 8, 10, 12, 14, 16, 18, 20, 22, 24, 26, 28, 30, 32, 34, 36, 38, 40, 42, 44, 46, 48, 50, 52, 54, 56, 58, 60, 62, 64, 66, 68, 70, 72, 74, 76, 78, 80, 82, 84, 86, 88, 90, 92, 94, 96, 98, 100, 102, 104, 106, 108, 110, 112, 114, 116, 118, 120, 122, 124, 126, 128, 130, 132, 134, 136, 138, 140, 142, 144, 146, 148, 150, 152 or 154 can be substituted with other nucleotides without altering the amino acid sequence of the protein produced from the gene. Therefore the DNA sequences of the present invention also include nucleotide sequences altered by substitution based on the degeneracy of the genetic code without alteration of the amino acid sequence. Such DNA sequences can be synthesized using known methods.

[0102] The DNA of the present invention includes a DNA which encodes a protein capable of phosphorylating Elk1 and/or activating kinase which phosphorylates Elk1 and hybridizes under stringent conditions with the DNA sequence of any one of the above nucleotide sequences of SEQ ID NOS: 1, 3, 5, 7, 9, 11, 13, 15, 17, 19, 21, 23, 25, 27, 29, 31, 33, 35, 37, 39, 41, 43, 45, 47, 49, 51, 53, 55, 57, 59, 61, 63, 65, 67, 69, 71, 73, 75, 77, 79, 81, 83, 85, 87, 89, 91, 93, 95, 97, 99, 101, 103, 105, 107, 109, 111, 113, 115, 117, 119, 121, 123, 125, 127, 129, 131, 133, 135, 137, 139, 141, 143, 145, 147, 149, 151 and 153 or a polynucleotide sequence complementary to said nucleotide sequence. Stringent conditions are apparent to those skilled in the art, and can be easily attained in accordance with various laboratory manuals such as T. Maniatis et al., Molecular Cloning A Laboratory Manual, Cold Spring Harbor Laboratory 1982, 1989.

[0103] That is, “stringent conditions” refer to overnight incubation at 37° C. in a hybridization solution containing 30% formamide, 5×SSC (0.75 M NaCl, 75 mM trisodium citrate),5×Denhardt's solution, 0.5% SDS, 100 μg/ml denatured, sheared salmon sperm DNA) followed by washing (three times) in 2×SSC, 0.1% SDS for 10 minutes at room temperature, then followed by washing (two times) in 1×SSC, 0.1% SDS for 10 minutes at 37° C.(low stringency). Preferred stringent conditions are overnight incubation at 42° C. in a hybridization solution containing 40% formamide, followed by washing (three times) in 2×SSC, 0.1% SDS for 10 minutes at room temperature, then followed by washing (two times) in 0.2×SSC, 1% SDS for 10 minutes at 42° C.(moderate stringency). More preferred stringent conditions are overnight incubation at 42° C. in a hybridization solution containing 50% formamide, followed by washing (three times) in 2×SSC, 0.1% SDS for 10 minutes at room temperature, followed by washing (two times) in 0.2×SSC, 0.1% SDS for 10 minutes at 50° C. (high stringency). The DNA sequence thus obtained must encode a protein capable of phosphorylating Elk1 and/or activating kinase which phosphorylates Elk1.

[0104] The present invention also includes a polynucleotide comprising a nucleotide sequence which encodes a protein capable of phosphorylating Elk1 and/or activating kinase which phosphorylates Elk1 and has a high sequence similarity to the nucleotide sequence of the polynucleotide according to above item (3) or (4). Typically these nucleotide sequence are 95% identical, preferably 97% identical, more preferably 98-99% identical, most preferably at least 99% identical to the nucleotide sequence of the polynucleotide according to above item (3) or (4) over the entire length thereof.

[0105] The above nucleotide sequence of the present invention can be used to produce the above protein using recombinant DNA techniques. In general, the DNA and peptide of the present invention can be obtained by:

[0106] (A) cloning the DNA encoding the protein of the present invention;

[0107] (B) inserting the DNA encoding the entire coding region of the protein or a part thereof into an expression vector to construct a recombinant vector;

[0108] (C) transforming host cells with the recombinant vector thus constructed; and

[0109] (D) culturing the obtained cells to express the protein or its analogue, and then purifying it by column chromatography.

[0110] General procedures necessary to handle DNA and recombinant host cells (e.g., E. coli) in the above steps are well known to those skilled in the art, and can be easily carried out in accordance with various laboratory manuals such as T. Maniatis et al., supra. All the enzymes, reagents, etc., used in these procedures are commercially available, and unless otherwise stated, such commercially available products can be used according to the conditions specified by the manufactures' instructions to attain completely its objects. The above steps (A) to (D) can be further illustrated in more details as follows.

[0111] Techniques for cloning the DNA encoding the protein of the above step (A) include, in addition to the methods described in the specification of the present application, PCR amplification using synthetic DNA containing a part of the nucleotide sequence of the present invention (e.g., SEQ ID NO: 1, 3, 5, 7, 9, 11, 13, 15, 17, 19, 21, 23, 25, 27, 29, 31, 33, 35, 37, 39, 41, 43, 45, 47, 49, 51, 53, 55, 57, 59, 61, 63, 65, 67, 69, 71, 73, 75, 77, 79, 81, 83, 85, 87, 89, 91, 93, 95, 97, 99, 101, 103, 105, 107, 109, 111, 113, 115, 117, 119, 121, 123, 125, 127, 129, 131, 133, 135, 137, 139, 141, 143, 145, 147, 149, 151 or 153) as a primer, and selection of the DNA inserted into a suitable vector by hybridization with a labeled DNA fragment encoding a partial or full coding region of the protein of the present invention or a labeled synthetic DNA. Another technique involves direct amplification of DNA from total RNAs or mRNA fractions prepared from cells or tissues, using the reverse transcriptase polymerase chain reaction (RT-PCR method). As a DNA inserted into a suitable vector, for example, a commercially available library (e.g., from CLONTECH and STRATAGENE) can be used.

[0112] Techniques for hybridization are normally used in the art, and can be easily carried out in accordance with various laboratory manuals such as T. Maniatis et al., supra.

[0113] Depending on the intended purpose, the cloned DNA encoding the protein of the present invention can be used as such or if desired after digestion with a restriction enzyme or addition of a linker. The DNA thus obtained may have a nucleotide sequence of SEQ ID NOS: 1, 3, 5, 7, 9, 11, 13, 15, 17, 19, 21, 23, 25, 27, 29, 31, 33, 35, 37, 39, 41, 43, 45, 47, 49, 51, 53, 55, 57, 59, 61, 63, 65, 67, 69, 71, 73, 75, 77, 79, 81, 83, 85, 87, 89, 91, 93, 95, 97, 99, 101, 103, 105, 107, 109, 111, 113, 115, 117, 119, 121, 123, 125, 127, 129, 131, 133, 135, 137, 139, 141, 143, 145, 147, 149, 151 or 153, or a polynucleotide of above items (3) to (6). The DNA sequence to be inserted into an expression vector in the above step (B) may be a full-length cDNA or a DNA fragment encoding the above full-length protein, or a DNA fragment constructed so that it expresses a part thereof.

[0114] Thus, the present invention also includes a recombinant vector, which comprises the above DNA sequence. The expression vector for the protein of the present invention can be produced, for example, by excising the desired DNA fragment from the DNA encoding the protein of the present invention, and ligating the DNA fragment downstream of a promoter in a suitable expression vector.

[0115] Expression vectors for use in the present invention may be any vectors derived from prokaryotes (e.g., E. coli), yeast, fungi, insect viruses and vertebrate viruses so long as such vectors are replicable. However, the vectors should be selected to be compatible with microorganisms or cells used as hosts. Suitable combinations of host cell—expression vector systems are selected depending on the desired expression product.

[0116] When bacteria are used as hosts, plasmid vectors compatible with these bacteria are generally used as replicable expression vectors for recombinant DNA molecules.

[0117] For example, the plasmids pBR322 and pBR327 can be used to transform E. coli. Plasmid vectors normally contain an origin of replication, a promoter, and a marker gene conferring upon a recombinant DNA a phenotype useful for selecting the cells transformed with the recombinant DNA. Example of such promoters include a β-lactamase promoter, lactose promoter and tryptophan promoter. Examples of such marker genes include an ampicillin resistance gene, and a tetracycline resistance gene. Examples of suitable expression vectors include the plasmids pUC18 and pUC19 in addition to pBR322, pBR327.

[0118] In order to express the DNA of the present invention in yeast, for example, YEp24 can be used as a replicable vector. The plasmid YEp24 contains the URA3 gene, which can be employed as a marker gene. Examples of promoters in expression vectors for yeast cells include promoters derived from genes for 3-phosphoglycerate kinase, glyceraldehyde-3-phosphate dehydrogenase and alcohol dehydrogenase.

[0119] Examples of promoters and terminators for use in expression vectors to express the DNA of the present invention in fungal cells include promoters and terminators derived from genes for phosphoglycerate kinase (PGK), glyceraldehyde-3-phosphate dehydrogenase (GAPD) and actin. Examples of suitable expression vectors include the plasmids pPGACY2 and pBSFAHY83.

[0120] Examples of promoters for use in expression vectors to express the DNA of the present invention in insect cells include a polyhedrin promoter and P10 promoter.

[0121] Recombinant vectors used to express the DNA of the present invention in animal cells normally contain functional sequences to regulate genes, such as an origin of replication, a promoter to be placed upstream of the DNA of the present invention, a ribosome-binding site, a polyadenylation site and a transcription termination sequence. Such functional sequences, which can be used to express the DNA of the present invention in eukaryotic cells, can be obtained from viruses. Examples of such functional sequences include an SR α promoter, SV40 promoter, LTR promoter, CMV (cytomegalovirus) promoter and HSV-TK promoter. Among them, a CMV promoter and SR α promoter can be preferably used. Promoters to be placed inherently upstream of the gene encoding the protein of the present invention, can be used so long as they are suitable for use in the above host-vector systems. Examples of origins of replication include foreign origins of replication, for example, those derived from viruses such as adenovirus, polyoma virus and SV40 virus. When vectors capable of integration into host chromosomes are used as expression vectors, origins of replication of the host chromosomes may be employed. Examples of suitable expression vectors include the plasmids pSV-dhfr (ATCC 37146), pBPV-1(9-1) (ATCC 37111), pcDNA3.1 (INVITROGEN) and pME18S-FL3.

[0122] The present invention also includes a transformed cell, which comprises the above recombinant vector.

[0123] Microorganisms or cells transformed with the replicable recombinant vector of the present invention can be selected from remaining untransformed parent cells based on at least one phenotype conferred by the recombinant vector. Phenotypes can be conferred by inserting at least one marker gene into the recombinant vector. Marker genes naturally contained in replicable vectors can be employed. Examples of marker genes include drug resistance genes such as neomycin resistance genes, and genes encoding dihydrofolate reductase.

[0124] As hosts for use in the above step (C), any of prokaryotes (e.g., E. coli), microorganisms (e.g., yeast and fungi) as well as insect and animal cells can be used so long as such hosts are compatible with the expression vectors used. Examples of such microorganisms include Escherichia coli strains such as E. coli K12 strain 294 (ATCC 31446), E. coli X1776 (ATCC 31537), E. coli C600, E. coli JM109 and E. coli B strain; bacterial strains belonging to the genus Bacillus such as Bacillus subtilis; intestinal bacteria other than E. coli, such as Salmonella typhimurium or Serratia marcescens; and various strains belonging to the genus Pseudomonas. Examples of such yeast include Saccharomyces cerevisiae, Schizosaccharomyces pombe, and Pichia pastoris. Examples of such fungi include Aspergillus nidulans, and Acremonium chrysogenum (ATCC 11550).

[0125] As insect cells, for example, Spodoptera frugiperda (Sf cells), High Five™ cells derived from eggs of Trichoplusiani, etc., can be used when the virus is AcNPV. Examples of such animal cells include HEK 293 cells, COS-1 cells, COS-7 cells, Hela cells, and Chinese hamster ovary (CHO) cells. Among them, CHO cells and HEK 293 cells are preferred.

[0126] When cells are used as hosts, combinations of expression vectors and host cells to be used vary with experimental objects. According to such combinations, two types of expression (i.e. transient expression and constitutive expression) can be included.

[0127] “Transformation” of microorganisms and cells in the above step (C) refers to introducing DNA into microorganisms or cells by forcible methods or phagocytosis of cells and then transiently or constitutively expressing the trait of the DNA in a plasmid or an intra-chromosome integrated form. Those skilled in the art can carry out transformation by known methods [see e.g., “Idenshi Kougaku Handbook (Genetic Engineering Handbook)”, an extra issue of “Jikken Igaku (Experimental Medicine)”, YODOSHA CO., LTD.]. For example, in the case of animal cells, DNA can be introduced into cells by known methods such as DEAE-dextran method, calcium-phosphate-mediated transfection, electroporation, lipofection, etc. For stable expression of the protein of the present invention using animal cells, there is a method in which selection can be carried out by clonal selection of the animal cells containing the chromosomes into which the introduced expression vectors have been integrated. For example, transformants can be selected using the above selectable marker as an indication of successful transformation. In addition, the animal cells thus obtained using the selectable marker can be subjected to repeated clonal selection to obtain stable animal cell strains highly capable of expressing the protein of the present invention. When a dihydrofolate reductase (DHFR) gene is used as a selectable marker, one can culture animal cells while gradually increasing the concentration of methotrexate (MTX) and select the resistant strains, thereby amplifying the DNA encoding the protein of the present invention together with the DHFR gene to obtain animal cell strains having higher levels of expression.

[0128] The above transformed cells can be cultured under conditions which permit the expression of the DNA encoding the protein of the present invention to produce and accumulate the protein of the present invention. In this manner, the protein of the present invention can be produced. Thus, the present invention also includes a process for producing a protein, which comprises culturing a transformed cell comprising the isolated polynucleotide according to above item (3) to (6) under conditions providing expression of the encoded protein and recovering the protein from the culture.

[0129] The above transformed cells can be cultured by methods known to those skilled in the art (see e.g., “Bio Manual Series 4”, YODOSHA CO., LTD.). For example, animal cells can be cultured by various known animal cell culture methods including attachment culture such as Petri dish culture, multitray type culture and module culture, attachment culture in which cells are attached to cell culture carriers (microcarriers), suspension culture in which productive cells themselves are suspended. Examples of media for use in the culture include media commonly used for animal cell culture, such as D-MEM and RPMI 1640.

[0130] In order to separate and purify the protein of the present invention from the above culture, suitable combinations of per se known separation and purification methods can be used. Examples such methods include methods based on solubility, such as salting-out and solvent precipitation; methods based on the difference in charges, such as ion-exchange chromatography; methods mainly based on the difference in molecular weights, such as dialysis, ultrafiltration, gel filtration and SDS-polyacrylamide gel electrophoresis; methods based on specific affinity, such as affinity chromatography; methods based on the difference in hydrophobicity, such as reverse phase high performance liquid chromatography; and methods based on the difference in isoelectric points, such as isoelectric focusing. For example, a protein of the present invention can be recovered and purified from recombinant cell cultures by well-known methods including ammonium sulfate or ethanol precipitation, acid extraction, anion or cation exchange chromatography, phosphocellulose chromatography, hydrophobic interaction chromatography, affinity chromatography, hydroxyapatite chromatography and lectin chromatography. Well known techniques for refolding proteins may be employed to regenerate active conformation when the polypeptide is denatured during intracellular synthesis, isolation or purification.

[0131] The protein of the present invention can also be produced as a fusion protein with another protein. These fusion proteins are also included within the present invention. For the expression of such fusion proteins, any vectors can be used so long as the DNA encoding the protein can be inserted into the vectors and the vectors can express the fusion protein. Examples of proteins to which a polypeptide of the present invention can be fused include glutathione S-transferase (GST) and a hexa-histidine sequence (6×His). The fusion protein of the protein of the present invention with another protein can be advantageously purified by affinity chromatography using a substance with an affinity for the fusion partner protein. For example, fusion proteins with GST can be purified by affinity chromatography using glutathione as a ligand.

[0132] The present invention also includes an inhibitory protein, i.e., a protein capable of inhibiting the activity of the protein of above item (7). Examples of such inhibitory proteins include antibodies, thereby inhibiting the expression of their activity.

[0133] The present invention also includes an antibody that reacts with the protein of the present invention or a fragment thereof. More preferably, the present invention relates to an antibody that reacts specifically with the above-mentioned protein of the present invention or a fragment thereof, and the method of production of such an antibody. Herein, “specifically” refers to there being little, or preferably no, crossreactivity. The antibody is not specifically limited so long as it can recognize the protein of the present invention. Examples of such antibodies include polyclonal antibodies, monoclonal antibodies and their fragments, single chain antibodies and humanized antibodies. Antibody fragments can be produced by known techniques. Examples of such antibody fragments include, but not limited to, F(ab′)₂ fragments, Fab′ fragments, Fab fragments and Fv fragments. The antibody that specifically binds the protein of the present invention can be produced using the protein of the present invention or a peptide thereof as an immunogen according to per se known process for producing antibodies or antisera. For example, a monoclonal or polyclonal antibody can be produced by administering the protein or epitope-bearing fragments according to above item (1) or (2) as an antigen to a non-human animal. Such methods are described, for example, in “Shin Idenshi Kougaku Handbook (New Genetic Engineering Handbook)”, the third edition, an extra issue of “Jikken Igaku (Experimental Medicine)”, YODOSHA CO., LTD.

[0134] In the case of polyclonal antibodies, for example, the protein of the present invention or a peptide thereof can be injected to animals to produce antibodies directed against the protein or peptide, and then their blood can be collected. The polyclonal antibodies can be purified from the blood, for example, by ammonium sulfate precipitation or ion-exchange chromatography, or by using the affinity column on which the antigen protein has been immobilized.

[0135] In the case of monoclonal antibodies, for example, animals such as mice are immunized with the protein of the present invention, their spleen is removed and homogenized to obtain spleen cells, which are then fused with mouse myeloma cells by using a reagent such as polyethylene glycol. From the resulting hybrid cells (i.e. hybridoma cells), the clone producing the antibody directed against the protein of the present invention can be selected. Then, the resulting clonal hybridoma cells can be implanted intraperitoneally into mice, the ascitic fluid recovered from the mice. The resulting monoclonal antibody can be purified from ascitic fluid, for example, by ammonium sulfate precipitation or ion-exchange chromatography, or by using the affinity column on which the protein has been immobilized.

[0136] When the resulting antibody is used to administer it to humans, it is preferably used as a humanized antibody or human antibody in order to reduce its immunogenicity. The human antibody can be produced using transgenic mice or other mammals. For a general review of humanized, and human antibodies, see, for example, Morrison, S. L. et al., Proc. Natl. Acad. Sci. USA, 81:6851-6855 (1984); Jones, P. T. et al., Nature 321:522-525 (1986); Hiroshi Noguchi, Igaku no Ayumi (J. Clin. Exp. Med.) 167:457-462 (1993); Takashi Matsumoto, Kagaku to Seibutsu (Chemistry and Biology) 36:448-456 (1998). Humanized chimeric antibodies can be produced by linking a V region of a mouse antibody to a C region of a human antibody. Humanized antibodies can be produced from a mouse monoclonal antibody by substituting a sequence derived from a human antibody for a region other than a complementarity-determining region. In addition, human antibodies can be directly produced in the same manner as the production of conventional monoclonal antibodies by immunizing the mice whose immune systems have been replaced with human immune systems. These antibodies can be used to isolate or to identify clones expressing the protein or to purify the protein of the present invention from a cell extract or transformed cells producing the protein of the present invention. These antibodies can also be used to construct ELISA, RIA (radioimmunoassay) and western blotting systems. These assay systems can be used for diagnostic purposes for detecting an amount of the protein of the present invention present in a body sample in a tissue or a fluid in the blood of an animal, preferably human. For example, they can be used for diagnosis of a disease characterized by undesirable activation of MAP kinase cascade resulting from (expression) abnormality of the protein of the present invention, such as inflammation, autoimmune disease, infection (for example, HIV infection), cancer and the like. In order to provide a basis for diagnosis of a disease, a standard value must be established. This is a well-known technique to those skilled in the art. For example, a method of calculating the standard value comprises binding a body fluid or a cell extract of normal individual of a human or an animal to an antibody against the protein of the present invention under a suitable condition for the complex formation, detecting the amount of the antibody-protein complex by chemical or physical means and then calculating the standard value for the normal sample using a standard curve prepared from a standard solution containing a known amount of an antigen (the protein of the present invention). The presence of a disease can be confirmed by deviation from the standard value obtained by comparison of the standard value with the value obtained from a sample of an individual latently suffering from a disease associated with the protein of the present invention. These antibodies can also be used as reagents for studying functions of the protein of the present invention.

[0137] The antibodies of the present invention can be purified and then administered to patients characterized by undesirable activation of MAP kinase cascade resulting from (expression) abnormality of the protein of the present invention, such as inflammation, autoimmune disease, infection (such as HIV infection), cancer and the like. Thus in another aspect, the present invention is a pharmaceutical composition which comprises the above antibody as an active ingredient, and therapy using the antibody of the present invention. In such pharmaceutical compositions, the active ingredient may be combined with other therapeutically active ingredients or inactive ingredients (e.g., conventional pharmaceutically acceptable carriers or diluents such as immunogenic adjuvants) and physiologically non-toxic stabilizers and excipients. The resulting combinations can be sterilized by filtration, and formulated into vials after lyophilization or into various dosage forms in stabilized and preservable aqueous preparations. Administration to a patient can be intra-arterial administration, intravenous administration and subcutaneous administration, which are well known to those skilled in the art. The dosage range depends upon the weight and age of the patient, route of administration and the like. Suitable dosages can be determined by those skilled in the art. These antibodies exhibit therapeutic activity by inhibiting the MAP kinase activation mediated by the protein of the present invention.

[0138] The DNA of the present invention can also be used to isolate, identify and clone other proteins involved in intracellular signal transduction processes. For example, the DNA sequence encoding the protein of the present invention can be used as a “bait” in yeast two-hybrid systems (see e.g., Nature 340:245-246 (1989)) to isolate and clone the sequence encoding a protein (“prey”) which can associate with the protein of the present invention. In a similar manner, it can be determined whether the protein of the present invention can associate with other cellular proteins (e.g., JNK, p38). In another method, proteins which can associate with the protein of the present invention can be isolated from cell extracts by immunoprecipitation [see e.g., “Shin Idenshi Kougaku Handbook (New Genetic Engineering Handbook)”, an extra issue of “Jikken Igaku (Experimental Medicine)”, YODOSHA CO., LTD.] using antibodies directed against the protein of the present invention. In still another method, the protein of the present invention can be expressed as a fusion protein with another protein as described above, and immunoprecipitated with an antibody directed against the fusion protein in order to isolate a protein which can associate with the protein of the present invention.

[0139] The above-described diagnostic assays offer a process for diagnosing or determining a susceptibility to the diseases through detection of mutation in the gene encoding protein (1) or (2) which functions to phosphorylate Elk1 and/or activate a kinase which phosphorylates Elk1, by the methods described. In addition, such diseases may be diagnosed by methods comprising determining from a sample derived from a subject an abnormally decreased or increased level of protein or mRNA. Decreased or increased expression can be measured at the mRNA level using any of the methods well known in the art for the quantitation of polynucleotides, such as nucleic amplification, for example, RT-PCR, RNase protection, Northern blotting and other hybridization methods. Assay techniques that can be used to determine levels of a protein in a sample derived from a host are well-known to those skilled in the art. Such assay methods include radioimmunoassays, competitive-binding assays, Western blot analysis and ELISA assays. The DNA of the present invention can be used to detect abnormality in the DNA or mRNA encoding the protein of the present invention or a peptide fragment thereof. Thus, for example, the DNA of the present invention is useful for gene diagnosis regarding damage, mutations, and reduced, increased or over-expression of the DNA or mRNA. That is, the present invention includes a method for diagnosing a disease or susceptibility to a disease related to expression or activity of the protein in a subject, which comprises:

[0140] (a) determining the presence or absence of a mutation in the nucleotide sequence encoding the protein of claim 1 or 2 in the genome of said subject; and/or

[0141] (b) analyzing the amount of expression of said protein in a sample derived from said subject, wherein a diagnosis of disease preferably is made when the amount of the protein expressed is 2-fold or higher than normal, or half or lower than normal.

[0142] When the nucleotide sequence encoding protein (1) or (2) which functions to phosphorylate Elk1 and/or activate a kinase which phosphorylates Elk1, contains a mutation according to the above step (a), the mutation may cause disease associated with the MAP kinase cascade. When the amount of the expression of the protein of above item (12) is different from the normal value according to the above step (b), abnormal expression of the novel protein of the present invention which functions to phosphorylate Elk1 and/or activate a kinase which phosphorylates Elk1 may be responsible for diseases associated with the Elk1 phosphorylating action or a kinase which phosphorylates Elk1. Determination of the presence or absence of a mutation in the nucleotide sequence encoding protein (1) or (2) which functions to phosphorylate Elk1 and/or activate a kinase which phosphorylates Elk1 in the above step (a) may involve RT-PCR using a part of the nucleotide sequence of protein (1) or (2) encoding gene as a primer, followed by conventional DNA sequencing to detect the presence or absence of the mutation. PCR-SSCP [Genomics 5:874-879 (1989); “Shin Idenshi Kougaku Handbook (New Genetic Engineering Handbook)”, an extra issue of “Jikken Igaku (Experimental Medicine)”, YODOSHA CO., LTD.] can also be used to determine the presence or absence of the mutation. Measurement of the amount of the expression of the protein in the above step (b) may involve, for example, using the antibody of above item (16).

[0143] The present invention also includes a method for screening compounds for activity as inhibitors or activators of MAP kinase cascade, which comprises the steps of:

[0144] (a) providing a cell with a gene encoding a protein that phosphorylates Elk1 and/or activates kinase which phosphorylates Elk1, and a component that provides a detectable signal upon activation thereof;

[0145] (b) culturing the transformed cell under conditions, which permit the expression of the gene in the transformed cell;

[0146] (c) contacting the transformed cell with one or more compounds; and

[0147] (d) measuring the detectable signal; and

[0148] (e) isolating or identifying a compound as an activator compound and/or an inhibitor compound according to the measurement of the detectable signal.

[0149] Preferably, in step (e), a compound that increases said detectable signal 2-fold or higher than normal is isolated or identified as an activator compound, and a compound that decreases said detectable signal to half or lower than normal is isolated or identified as an inhibitor compound.

[0150] Examples of components capable of providing a detectable signal include reporter genes. Reporter genes are used instead of directly detecting the activation of transcription factors of interest. The transcriptional activity of a promoter of a gene is analyzed by linking the promoter to a reporter gene and measuring the activity of the product of the reporter gene (“Bio Manual Series 4” (1994), YODOSHA CO., LTD.). Any peptide or protein can be used so long as those skilled in the art can measure the activity or amount of the expression product (including the amount of the produced mRNA) of the reporter genes. For example, enzymatic activity of chloramphenicol acetyltransferase, β-galactosidase, luciferase, etc., can be measured. Any reporter plasmids can be used to evaluate MAP kinase cascade activation. One example is the reporter plasmids that have a yeast transcription factor Gal4 recognition sequence inserted upstream of the reporter gene. For example, pFR-Luc (STRATAGENE) can be used by introduction into a host cell together with various fusion proteins of genes being substrates of MAP kinase such as Elk1 and ATF2 connected to yeast Gal4 protein DNA binding region gene: e.g. pFA2-Elk1 or pFA2-ATF2 (STRATAGENE).

[0151] Any host cells can be used so long as Elk1 phosphorylation action or kinase activation which phosphorylates Elk1 can be detected in the host cells. Preferred host cells are mammalian cells such as HEK293-EBNA cells. Transformation and culture of the cells can be carried out as described above. In a specific embodiment, the method for screening a compound which inhibits or activates MAP kinase cascade activation comprises culturing the transformed cell for a certain period of time, adding a certain amount of a test compound, measuring the reporter activity expressed by the cell after a certain period of time, and comparing the activity with that of a cell to which the test compound has not been added. The reporter activity can be measured by methods known in the art (see e.g., “Bio Manual Series 4” (1994), YODOSHA CO., LTD.). Examples of test compounds include, but not limited to, low molecular weight compounds and peptides. Test compounds may be artificially synthesized compounds or naturally occurring compounds. Test compounds may be a single compound or mixtures. Other examples of methods for detecting detectable signals include ELISA assay or Western blotting assay using an antibody to detect phosphorylation of various MAP kinases such as p38, JNK, ERK, etc., in addition to assays of the above reporter genes.

[0152] It is also possible to produce a pharmaceutical composition according to the following steps (a) to (f):

[0153] (a) providing a cell with a gene encoding a protein that phosphorylates Elk1 and/or activates kinase which phosphorylates Elk1, and a component that provides a detectable signal upon activation thereof;

[0154] (b) culturing the transformed cell under conditions, which permit the expression of the gene in the transformed cell;

[0155] (c) contacting the transformed cell with one or more candidate compounds;

[0156] (d) measuring the detectable signal; and

[0157] (e) isolating or identifying a compound as an activator compound and/or an inhibitor compound according to the measurement of the detectable signal; and

[0158] (f) optimizing the isolated or identified compound as a pharmaceutical composition.

[0159] Preferably, in step (e), a compound that increases said detectable signal 2-fold or higher than normal is isolated or identified as an activator compound, and a compound that decreases said detectable signal to half or lower than normal is isolated or identified as an inhibitor compound.

[0160] The amount of mRNA can be measured, for example, by northern hybridization, RT-PCR, etc. The amount of proteins can be measured, for example, by using antibodies. The antibodies may be produced by known methods. Commercially available antibodies(from, e.g., Wako Pure Chemical Industries, Ltd.)can also be used.

[0161] The protein of the present invention may also be used in a method for the structure-based design of an agonist, antagonist or inhibitor of the protein, by:

[0162] (a) determining the three-dimensional structure of the protein;

[0163] (b) deducing the three-dimensional structure for the likely reactive or binding site(s) of an agonist, antagonist or inhibitor;

[0164] (c) synthesizing candidate compounds that are predicted to bind to or react with the deduced binding or reactive site; and

[0165] (d) testing whether the candidate compounds are indeed agonists, antagonists or inhibitor.

[0166] The present invention also includes a compound obtainable by the above screening method. However, the screening method of the present invention is not limited to the above method. The present invention also includes a process for producing the pharmaceutical composition by the method of above item (14).

[0167] There is no special limitation to the above candidate compounds. Such compounds include low molecular weight compounds and peptides. They may be artificially synthesised compounds and naturally occurring compounds. As the compounds obtained by the above screening methods have a function as inhibiting or activating Elk1 phosphorylation action or kinase which phosphorylates Elk1, they are useful as therapeutic or preventive pharmaceuticals for the treatment of diseases resulting from unfavorable activation or inactivation of Elk1 phosphorylation action or kinase which phosphorylates Elk1. In order to isolate and purify the target compounds from the mixture, it is suitable to combine the known methods such as filtration, extraction, washings, drying, concentration, crystallization, various chromatography. When obtainment of a salt of the compounds is desired, a compound which is obtained in the form of a salt can be purified as it is. A compound which is obtained in the free form can be converted into a salt by isolating and purifying a salt obtained by dispersing or dissolving the compound into a suitable solvent and then adding a desired acid or base. Examples of a step to optimize the compounds or salts thereof obtained by the method of the present invention as a pharmaceutical composition, include a step of formulating the compounds or salts thereof according to ordinary processes such as the following. The above compounds or their pharmaceutically acceptable salts in an amount effective as an active ingredient, and pharmaceutically acceptable carriers can be mixed. Further, a form of formulation suitable for the mode of administration is selected. A composition suitable for oral administration includes a solid form such as tablet, granule, capsule, pill and powder, and solution form such as solution, syrup, elixir and dispersion. A form useful for parenteral administration includes sterile solution, dispersion, emulsion and suspension. The above carriers include, for example, sugars such as gelatin, lactose and glucose, starches such corn, wheat, rice and maize, fatty acids such as stearic acid, salts of fatty acids such as calcium stearate, magnesium stearate, talc, vegetable oil, alcohol such as stearyl alcohol and benzyl alcohol, gum, and polyalkylene glycol. Examples of such liquid carriers include generally water, saline, sugar solution of dextrose and the like, glycols such as ethylene glycol, propylene glycol and polyethylene glycol.

[0168] The present invention also includes a kit for screening a compound for activity as an inhibitor or activator of Elk1 phosphorylation and/or activation of a kinase which phosphorylates Elk1. The kit comprises reagents, etc. necessary for screening compounds for activity as an inhibitor or activator of Elk1 phosphorylation and/or activation of a kinase which phosphorylates Elk1, including:

[0169] (a) a cell comprising a gene encoding a protein that phosphorylates Elk1 and/or activates kinase which phosphorylates Elk1, and a component capable of providing a detectable signal upon phosphorylation of Elk1; and

[0170] (b) reagents for measuring the detectable signal.

[0171] In another aspect, the present invention relates to a diagnostic kit which comprises:

[0172] (a) a polynucleotide of the present invention having a nucleotide sequence shown in SEQ ID NO: 1, 3, 5, 7, 9, 11, 13, 15, 17, 19, 21, 23, 25, 27, 29, 31, 33, 35, 37, 39, 41, 43, 45, 47, 49, 51, 53, 55, 57, 59, 61, 63, 65, 67, 69, 71, 73, 75, 77, 79, 81, 83, 85, 87, 89, 91, 93, 95, 97, 99, 101, 103, 105, 107, 109, 111, 113, 115, 117, 119, 121, 123, 125, 127, 129, 131, 133, 135, 137, 139, 141, 143, 145, 147, 149, 151 or 153;

[0173] (b) a polynucleotide having a nucleotide sequence complementary to the nucleotide sequence of (a);

[0174] (c) a protein of the present invention having an amino acid sequence shown in SEQ ID NO: 2, 4, 6, 8, 10, 12, 14, 16, 18, 20, 22, 24, 26, 28, 30, 32, 34, 36, 38, 40, 42, 44, 46, 48, 50, 52, 54, 56, 58, 60, 62, 64, 66, 68, 70, 72, 74, 76, 78, 80, 82, 84, 86, 88, 90, 92, 94, 96, 98, 100, 102, 104, 106, 108, 110, 112, 114, 116, 118, 120, 122, 124, 126, 128, 130, 132, 134, 136, 138, 140, 142, 144, 146, 148, 150, 152 or 154 or a fragment thereof; or

[0175] (d) an antibody to the protein of the present invention, such of (c) above.

[0176] A kit, which comprises at least one of (a), (b), (c) or (d), is useful for diagnosing a disease or susceptibility to a disease such as inflammation, autoimmune diseases, infectious diseases (e.g., HIV infection) and cancers.

[0177] Because MAP kinase cascade is involved in a wide variety of pathological conditions such as inflammation, autoimmune diseases, cancers and viral infections, it is an attractive target for drug design and therapeutic intervention. Many experiments show that the inhibition of MAP kinase cascade activity may have significant physiological effects [e.g., J Cell Biochem Apr. 3-27, 2001; 82(1): 68-77, Pharmacol Res March 2001; 43(3): 275-83, Diabetes June 2001; 50(6): 1495-504, Diabetes June 2001; 50(6): 1464-71, Atherosclerosis May 2001; 156 (1): 81-90]. The finding of the new protein described herein capable of phosphorylating Elk1 and/or activating kinase which phosphorylates Elk1 has provided a new method for inhibiting an abnormal MAP kinase cascade activation. Thus, the present invention also relates to use of a compound which inhibits the function of the protein capable of phosphorylating Elk1 and/or activating kinase which phosphorylates Elk1 described above, for inhibiting MAP kinase cascade activation. The compound obtained by the above screening method, which inhibits Elk1 phosphorylation action or kinase which phosphorylates Elk1, is useful as a medicament to treat or prevent diseases characterized by undesirable activation of MAP kinase cascade, such as inflammation, autoimmune diseases, infectious diseases (e.g., HIV infection) and cancers. It is known that there are cases where MAP kinase cascade activation induces apoptosis, and it is thought that there is a possibility that an inhibitor of Elk1 phosphorylation action and/or a kinase which phosphorylates Elk1 will control apoptosis. Diseases which may be treated by the inhibition of apoptosis include GVHD, skin diseases such as toxic epidermal necrolysis (TEN), proliferative nephritides (e.g., IgA nephritis, purpuric nephritis and lupus nephritis) and fulminant hepatitis. In contrast, examples of patients for whom the induction of apoptosis may be exploited in treatment include tumor patients. Thus, the compound obtained by the above screening method, which promotes Elk1 phosphorylation action, is useful as a medicament to treat or prevent these diseases.

[0178] In addition, the gene encoding the protein of the present invention is useful for gene therapy to treat various diseases such as cancers, autoimmune diseases, allergy diseases and inflammatory response. “Gene therapy” refers to administering into the human body a gene or a cell into which a gene has been introduced. The protein of the present invention and the DNA encoding the protein can also be used for diagnostic purposes.

[0179] The compound obtained by the screening method of the present invention or a salt thereof can be formulated into the above pharmaceutical compositions (e.g., tablets, capsules, elixirs, microcapsules, sterile solutions and suspensions) according to conventional procedures. The formulations thus obtained are safe and of low toxicity, and can be administered, for example, to humans and mammals (e.g., rats, rabbits, sheep, pigs, cattle, cats, dogs and monkeys). Administration to patients can be carried out by methods known in the art, such as intra-arterial injection, intravenous injection and subcutaneous injection. The dosage may vary with the weight and age of the patient as well as a mode of administration, but those skilled in the art can appropriately select suitable dosages. When the compound can be encoded by DNA, the DNA can be inserted into a vector for gene therapy, and gene therapy can be carried out. The dosage and mode of administration may vary with the weight, age and symptoms of the patient, but those skilled in the art can appropriately select them. Thus, the present invention also relates to a pharmaceutical composition which comprises the above compound as an active ingredient.

[0180] In addition, the above compound is useful as a medicament to treat or prevent diseases characterized by undesirable activation of MAP kinase cascade, such as inflammation, autoimmune diseases, viral diseases, infectious diseases and cancers. Thus, the present invention also relates to a pharmaceutical composition for inflammation, autoimmune diseases, viral diseases, cancers, etc., which comprises the above compound. Specifically, the pharmaceutical composition is useful as a therapeutic and prophylactic drug against, for example, rheumatoid arthritis, osteoarthritis, systemic lupus erythematosus, diabetes, sepsis, asthma, allergic rhinitis, ischemic heart diseases, inflammatory intestinal diseases, subarachnoid hemorrhage, viral hepatitis, AIDS, GVHD, skin conditions such as toxic epidermal necrolysis (TEN), hyperplastic nephritis (IgA nephritis, purpuric nephritis, lupus nephritis), and fulminant hepatitis.

[0181] The present invention also relates to the use of a pharmaceutical composition produced according to above item (14) for manufacturing a medicament against inflammation, autoimmune diseases, viral diseases, cancers, etc. The present invention also includes an antisense oligonucleotide against a gene of any one of above items (3) to (6). An antisense oligonucleotide refers to an oligonucleotide complementary to the target gene sequence. The antisense oligonucleotide can inhibit the expression of the target gene by inhibiting RNA functions such as translation to proteins, transport to the cytoplasm and other activity necessary for overall biological functions. In this case, the antisense oligonucleotide may be RNA or DNA. The DNA sequence of the present invention can be used to produce an antisense oligonucleotide capable of hybridizing with the mRNA transcribed from the gene encoding the protein of the present invention. It is known that an antisense oligonucleotide generally has an inhibitory effect on the expression of the corresponding gene (see e.g., Saibou Kougaku Vol.13, No.4 (1994)). The oligonucleotide containing an antisense coding sequence against a gene encoding the protein of the present invention can be introduced into a cell by standard methods. The oligonucleotide effectively blocks the translation of mRNA of the gene encoding the protein of the present invention, thereby blocking its expression and inhibiting undesirable activity.

[0182] The oligonucleotide of the present invention may be a naturally occurring oligonucleotide or its modified form [see e.g., Murakami & Makino, Saibou Kougaku Vol.13, No.4, p.259-266 (1994); Akira Murakami, Tanpakushitsu Kakusan Kouso (PROTEIN, NUCLEIC ACID AND ENZYME) Vol.40, No.10, p.1364-1370 (1995),Tunenari Takeuchi et al., Jikken Igaku (Experimental Medicine) Vol. 14, No. 4 p85-95(1996)]. Thus, the oligonucleotide may have modified sugar moieties or inter-sugar moieties. Examples of such modified forms include phosphothioates and other sulfur-containing species used in the art. According to several preferred embodiments of the present invention, at least one phosphodiester bond in the oligonucleotide is substituted with the structure which can enhance the ability of the composition to permeate cellular regions where RNA with the activity to be regulated is located.

[0183] Such substitution preferably involves a phosphorothioate bond, a phosphoramidate bond, methylphosphonate bond, or a short-chain alkyl or cycloalkyl structure. The oligonucleotide may also contain at least some modified base forms. Thus, it may contain purine and pyrimidine derivatives other than naturally occurring purine and pyrimidine. Similarly, the furanosyl moieties of the nucleotide subunits can be modified so long as the essential purpose of the present invention is attained. Examples of such modifications include 2′—O-alkyl and 2′-halogen substituted nucleotides. Examples of modifications in sugar moieties at their 2-position include OH, SH, SCH₃, OCH₃, OCN or O(CH₂)ₙCH₃, wherein n is 1 to about 10, and other substituents having similar properties. All the analogues are included in the scope of the present invention so long as they can hybridize with the mRNA of the gene of the present invention to inhibit functions of the mRNA.

[0184] The oligonucleotide of the present invention contains about 3 to about 50 nucleotides, preferably about 8 to about 25 nucleotides, more preferably about 12 to about 20 nucleotides. The oligonucleotide of the present invention can be produced by the well-known solid phase synthesis technique. Devices for such synthesis are commercially available from some manufactures including Applied Biosystems. Other oligonucleotides such as phosphothioates can also be produced by methods known in the art.

[0185] The oligonucleotide of the present invention is designed to hybridize with the mRNA transcribed from the gene of the present invention. Those skilled in the art can easily design an antisense oligonucleotides based on a given gene sequence (For example, Murakami and Makino: Saibou Kougaku Vol. 13 No.4 p259-266 (1994), Akira Murakami: Tanpakushitsu Kakusan Kouso (PROTEIN, NUCLEIC ACID AND ENZYME) Vol. 40 No.10 p1364-1370 (1995), Tunenari Takeuchi et al., Jikken Igaku (Experimental Medicine) Vol. 14 No. 4 p85-95 (1996)). Recent study suggests that antisense oligonucleotides which are designed in a region containing 5′ region of mRNA, preferably, the translation initiation site, are most effective for the inhibition of the expression of a gene. The length of the antisense oligonucleotides is preferably 15 to 30 nucleotides and more preferably 20 to 25 nucleotides. It is important to confirm no interaction with other mRNA and no formation of secondary structure in the oligonucleotide sequence by homology search. The evaluation of whether the designed antisense oligonucleotide is functional or not can be determined by introducing the antisense oligonucleotide into a suitable cell and measuring the amount of the target mRNA, for example by northern blotting or RT-PCR, or the amount of the target protein, for example by western blotting or fluorescent antibody technique, to confirm the effect of expression inhibition.

[0186] Another method includes the triple helix technique. This technique involves forming a triple helix on the targeted intra-nuclear DNA sequence, thereby regulating its gene expression, mainly at the transcription stage. The oligonucleotide is designed mainly in the gene region involved in the transcription and inhibits the transcription and the production of the protein of the present invention. Such RNA, DNA and oligonucleotide can be produced using known synthesizers.

[0187] The oligonucleotide may be introduced into the cells containing the target nucleic acid sequence by any of DNA transfection methods such as calcium phosphate method, electroporation, lipofection, microinjection, or gene transfer methods including the use of gene transfer vectors such as viruses. An antisense oligonucleotide expression vector can be prepared using a suitable retrovirus vector, then the expression vector can be introduced into the cells containing the target nucleic acid sequence by contacting the vector with the cells in vivo or ex vivo.

[0188] The DNA of the present invention can be used in the antisense RNA/DNA technique or the triple helix technique for the purpose of inhibiting MAP kinase cascade activation mediated by the protein of the present invention.

[0189] The antisense oligonucleotide against the gene encoding the protein of the present invention is useful as a medicament to treat or prevent diseases characterized by undesirable activation of MAP kinase cascade, such as inflammation, autoimmune diseases, infectious diseases (e.g., HIV infection) and cancers. Thus, the present invention also includes a pharmaceutical composition which comprises the above antisense oligonucleotide as an active ingredient. The antisense oligonucleotide can also be used to detect such diseases using northern hybridization or PCR.

[0190] The present invention also includes a ribozyme which inhibits Elk1 phosphorylation action and/or kinase which phosphorylates Elk1. A ribozyme is an RNA capable of recognizing a nucleotide sequence of a nucleic acid and cleaving the nucleic acid (see e.g., Hiroshi Yanagawa, “Jikken Igaku (Experimental Medicine) Bioscience 12: New Age of RNA). The ribozyme can be produced so that it cleaves the selected target RNA (e.g., mRNA encoding the protein of the present invention). Based on the nucleotide sequence of the DNA encoding the protein of the present invention, the ribozyme specifically cleaving the mRNA of the protein of the present invention can be designed. Such ribozyme has a complementary sequence to the mRNA for the protein of the present invention, complementarily associates with the mRNA and then cleaves the mRNA, which results in reduction or entire loss of the expression of the protein of the present invention. The level of the reduction of the expression is dependent on the level of the ribozyme expression in the target cells.

[0191] There are two types of ribozyme commonly used: a hammerhead ribozyme and a hairpin ribozyme. In particular, hammerhead ribozymes have been well studied regarding their primary and secondary structure necessary for their cleavage activity, and those skilled in the art can easily design the ribozyme nucleotides solely on the nucleotide sequence information for the DNA encoding the protein of the present invention [see e.g., Iida et al., Saibou Kougaku Vol.16, No.3, p.438-445 (1997); Ohkawa & Taira, Jikken Igaku (Experimental Medicine) Vol.12, No.12, p.83-88 (1994)]. It is known that the hammerhead ribozymes have a structure consisting of two recognition sites (recognition site I and recognition site II forming a chain complementary to target RNA) and an active site, and cleave the target RNA at the 3′ end of its sequence NUX (wherein N is A or G or C or U, and X is A or C or U)after the formation of a complementary pair with the target RNA in the recognition sites. In particular, the sequence GUC (or GUA) has been found to have the highest activity [see e.g., Koizumi, M. et al., Nucl. Acids Res. 17:7059-7071 (1989); Iida et al., Saibou Kougaku Vol.16, No.3, p.438-445 (1997); Ohkawa & Taira, Jikken Igaku (Experimental Medicine) Vol.12, No.12, p.83-88 (1994); Kawasaki & Taira, Jikken Igaku (Experimental Medicine) Vol.18, No.3, p.381-386 (2000)].

[0192] Therefore the sequence GTC (or GTA) is searched out, and a ribozyme is designed to form several, up to 10 to 20 complementary base pairs around that sequence. The suitability of the designed ribozyme can be evaluated by checking whether the prepared ribozyme can cleave the target mRNA in vitro according to the method described for example in Ohkawa & Taira, Jikken Igaku (Experimental Medicine) Vol.12, No.12, p.83-88 (1994). The ribozyme can be prepared by methods known in the art to synthesize RNA molecules.

[0193] Alternatively, the sequence of the ribozyme can be synthesized on a DNA synthesizer and inserted into various vectors containing a suitable RNA polymerase promoter (e.g., T7 or SP6) to enzymatically synthesize an RNA molecule in vitro. Such ribozymes can be introduced into cells by gene transfer methods such as microinjection. Another method involves inserting a ribozyme DNA into a suitable expression vector and introducing the vector into cell strains, cells or tissues. Suitable vectors can be used to introduce the ribozyme into a selected cell. Examples of vectors commonly used for such purpose include plasmid vectors and animal virus vectors (e.g., retrovirus, adenovirus, herpes or vaccinia virus vectors). Such ribozymes are capable of inhibiting the Elk1 phosphorylation action and/or kinase which phosphorylates Elk1 mediated by the protein of the present invention.

[0194] As mentioned above, full-length cDNA is used in the present invention. That means 5′ end sequence of the cDNA in the present invention is the transcription initiation site of the corresponding mRNA. Therefore the cDNA sequence can be used to identify the promoter region of the gene by comparing the cDNA with the genomic nucleotide sequence. Genomic nucleotide sequences are available from various databases when the sequences have been deposited in the databases. Alternatively, the cDNA can also be used to clone the desired sequence from a genomic library, for example, by hybridization, and determine its nucleotide sequence. Thus, by comparing the nucleotide sequence of the cDNA of the present invention with a genomic sequence, the promoter region of the gene located upstream the cDNA can be identified. In addition, the promoter fragment thus identified can be used to construct a reporter plasmid for evaluating the expression of the gene. In general, the DNA fragment spanning 2 kb (preferably 1 kb) upstream from the transcription initiation site can be inserted upstream of the reporter gene to produce the reporter plasmid. The reporter plasmid can be used to screen for a compound which enhances or reduces the expression of the gene. For example, such screening can be carried out by transforming a suitable cell with the reporter plasmid, culturing the transformed cell for a certain period of time, adding a certain amount of a test compound, measuring the reporter activity expressed by the cell after a certain period of time, and comparing the activity with that of a cell to which the test compound has not been added. These methods are also included in the scope of the present invention.

[0195] The present invention also relates to a computer-readable medium on which a sequence data set has been stored, said sequence data set comprising at least one nucleotide sequence selected from the group consisting of SEQ ID NOS: 1, 3, 5, 7, 9, 11, 13, 15, 17, 19, 21, 23, 25, 27, 29, 31, 33, 35, 37, 39, 41, 43, 45, 47, 49, 51, 53, 55, 57, 59, 61, 63, 65, 67, 69, 71, 73, 75, 77, 79, 81, 83, 85, 87, 89, 91, 93, 95, 97, 99, 101, 103, 105, 107, 109, 111, 113, 115, 117, 119, 121, 123, 125, 127, 129, 131, 133, 135 137, 139, 141, 143, 145, 147, 149, 151 and 153 and/or at least one amino acid sequence selected from the group consisting of SEQ ID NOS: 2, 4, 6, 8, 10, 12, 14, 16, 18, 20, 22, 24, 26, 28, 30, 32, 34, 36, 38, 40, 42, 44, 46, 48, 50, 52, 54, 56, 58, 60, 62, 64, 66, 68, 70, 72, 74, 76, 78, 80, 82, 84, 86, 88, 90, 92, 94, 96, 98, 100, 102, 104, 106, 108, 110, 112, 114, 116, 118, 120, 122, 124, 126, 128, 130, 132, 134, 136, 138, 140, 142, 144, 146, 148, 150, 152 and 154.

[0196] In another aspect, the present invention relates to a method for calculating a homology, which comprises comparing data on the above medium with data of other nucleotide sequences. Thus, the gene and amino acid sequence of the present invention provide valuable information for determining their secondary and tertiary structure, e.g., information for identifying other sequence having a similar function and high homology. These sequences are stored on the computer-readable medium, then a database is searched using data stored in a known macromolecule structure program and a known search tool such as GCG program package (Devereux, J. et al, Nucleic Acids Research 12(1):387 (1984)). In this manner, a sequence in a database having a certain homology can be easily found.

[0197] The computer-readable medium may be any composition of materials used to store information or data. Examples of such media include commercially available floppy disks, tapes, chips, hard discs, compact disks and video disks. The data on the medium allows a method for calculating a homology by comparing the data with other nucleotide sequence data. This method comprises the steps of providing a first polynucleotide sequence containing the polynucleotide sequence of the present invention for the computer-readable medium, and then comparing the first polynucleotide sequence with at least one second polynucleotide or polypeptide sequence to identify the homology.

[0198] The present invention also relates to an insoluble substrate to which a polynucleotide comprising all or part of a nucleotide sequence selected from the group consisting of SEQ ID NOS: 1, 3, 5, 7, 9, 11, 13, 15, 17, 19, 21, 23, 25, 27, 29, 31, 33, 35, 37, 39, 41, 43, 45, 47, 49, 51, 53, 55, 57, 59, 61, 63, 65, 67, 69, 71, 73, 75, 77, 79, 81, 83, 85, 87, 89, 91, 93, 95, 97, 99, 101, 103, 105, 107, 109, 111, 113, 115, 117, 119, 121, 123, 125, 127, 129, 131, 133, 135, 137, 139, 141, 143, 145, 147, 149, 151 and 153, is fixed. A plurality of the various polynucleotides which are DNA probes are fixed on a specifically processed solid substrates such as slide glass to form a DNA microarray and then a labeled target polynucleotide is hybridized with the fixed polynucleotides to detect a signal from each of the probes. The data obtained is analyzed and the gene expression is determined.

[0199] The present invention further relates to an insoluble substrate to which a polypeptide comprising all or part of an amino acid sequence selected from the group consisting of SEQ ID NOS: 2, 4, 6, 8, 10, 12, 14, 16, 18, 20, 22, 24, 26, 28, 30, 32, 34, 36, 38, 40, 42, 44, 46, 48, 50, 52, 54, 56, 58, 60, 62, 64, 66, 68, 70, 72, 74, 76, 78, 80, 82, 84, 86, 88, 90, 92, 94, 96, 98, 100, 102, 104, 106, 108, 110, 112, 114, 116, 118, 120, 122, 124, 126, 128, 130, 132, 134, 136, 138, 140, 142, 144, 146, 148, 150, 152 and 154 is fixed. Proteins, which are expected to be useful for diagnosis or development of a new drug, can be isolated and/or identified by mixing the insoluble substrate and a cell extract from organisms, and capturing the proteins onto the insoluble substrate.

### EXAMPLES

[0200] The following examples further illustrate, but do not limit the present invention.

### Example 1

### Construction of a Full-Length cDNA Library Using the Oligo-Capping Method

[0201] (1) Preparation of RNA from Human Lung Fibroblasts (Cryo NHLF)

[0202] Human lung fibroblasts (Cryo NHLF: purchased from Sanko Junyaku Co., Ltd.) were cultured according to the attached protocol. After the cells were cultured to obtain fifty 10 cm dishes, the cells were recovered with a cell scraper. Then, total RNA was obtained from the recovered cells by using the RNA extraction reagent ISOGEN (purchased from NIPPON GENE) according to the manufacture's protocol. Then, poly A⁺ RNA was obtained from the total RNA by using an oligo-dT cellulose column according to Maniatis et al., supra.

[0203] (2) Preparation of RNA from Mouse ATDC5 Cells

[0204] ATDC5, a cell strain cloned from mouse EC (embryonal carcinoma) (Atsumi, T. et al.: Cell Diff. Dev., 30: p109-116)(1990) was repeatedly subcultured to obtain fifty 10 cm dishes containing the resultant culture. Thereafter, poly A⁺ RNA was obtained by a method similar to that of (1) above. Culture of ATDC5 cells was performed according to the method described in Atsumi, T. et al.: Cell Diff. Dev., 30: p109-116 (1990).

[0205] (3) Construction of a Full-Length cDNA Library by the Oligo-Capping Method

[0206] A full-length cDNA library was constructed from the above poly A⁺ RNA by the oligo-capping method according to the method of Sugano S. et al. [e.g., Maruyama, K. & Sugano, S., Gene, 138:171-174 (1994); Suzuki, Y. et al., Gene, 200:149-156 (1997); Suzuki, Y. & Sugano, S. “Shin Idenshi Kougaku Handbook (New Genetic Engineering Handbook)”, the third edition (1999), an extra issue of “Jikken Igaku (Experimental Medicine)”, YODOSHA CO., LTD.].

[0207] (4) Preparation of Plasmid DNA

[0208] The full-length cDNA library constructed as above was transfected into E. coli strain TOP 10 by electroporation, then spread on LB agar medium, and incubated overnight at 37° C. Then, using QIAwell 96 Ultra Plasmid Kit (QIAGEN) according to the manufacturer's protocol, the plasmids were recovered from the colonies grown on ampicillin-containing LB agar medium.

### Example 2

### Cloning of DNA Capable of Phosphorylating Elk1 and/or Activating Kinase which Phosphorylates Elk1

[0209] (1) Screening of the cDNA Encoding the Protein Capable of Phosphorylating Elk1 and/or Kinase which Phosphorylates Elk1

[0210] 293-EBNA cells (purchased from Invitrogen) were grown to 1×10⁴ cells/well in a 96 well plate for cell culture for 24 hours at 37° C. (in the presence of 5% CO₂) using 5% FBS containing DMEM medium. Then, 60 ng of pFR-Luc (purchased from STRATAGENE), 0.25 ng of pFA2-Elk1 (purchased from STRATAGENE), 5 ng of pcDNA3.1 (+) (INVITROGEN) into which human p38 had been incorporated, 30 ng of pcDNA3.1(+) into which human JNJ 1 β 1 gene had been incorporated; and 2 μl of the full-length cDNA prepared in above Example 1.(3) were cotransfected into the cells in a well using FuGENE 6 (purchased from Roche) according to the manufacturer's protocol. After 24 hours of culture at 37° C., the reporter activity reflecting activation of MAP kinase cascade (luciferase activity) was measured using long-term luciferase assay system, PIKKA GENE LT2.0 (TOYO INK) according to the attached manufacturer's instructions. The luciferase activity was measured using Wallac ARVO™ ST 1420 MULTILABEL COUNTER (Perkin Elmer).

[0211] (2) DNA Sequencing

[0212] The above screening was carried out for 165,000 clones, and plasmids showing a 5-fold or more increase in luciferase activity compared to that of the control experiment (luciferase activity of the cell into which vacant vector pME18S-FL3 is introduced instead of full-length cDNA) were selected. One pass sequencing was carried out from the 5′ end of the cloned cDNA (sequencing primer: 5′-CTTCTGCTCTAAAAGCTGCG-3′ (SEQ ID NO: 155)) and from the 3′ end (sequencing primer: 5′-CGACCTGCAGCTCGAGCACA-3′ (SEQ ID NO: 156)) so that as long sequence as possible is determined. The sequencing was carried out using the reagent Thermo Sequenase II Dye Terminator Cycle Sequencing Kit (Amersham Pharmacia Biotech) or BigDye Terminator Cycle Sequencing FS Ready Reaction Kit (Applied Biosystems) and the device ABI PRISM 377 sequencer or ABI PRISM 3100 sequencer according to the manufacturer's instructions.

[0213] (3) Database Analysis of the Obtained Clones

[0214] BLAST (Basic local alignment search tool) searching [S. F. Altschul et al., J. Mol. Biol., 215:403-410 (1990)] was carried out in GenBank for the obtained nucleotide sequences. The results showed that 70 clones represented 37 genes encoding new proteins capable of phosphorylating Elk1 and/or kinase which phosphorylates Elk1.

[0215] (4) Full-Length Sequencing

[0216] The full-length DNA sequences for the 37 new clones were determined (SEQ ID NOS: 1, 3, 5, 7, 9, 11, 13, 15, 17, 19, 21, 23, 25, 27, 29, 31, 33, 35, 37, 39, 41, 43, 45, 47, 49, 51, 53, 55, 57, 59, 61, 63, 65, 67, 69, 71, 73, 75, 77, 79, 81, 83, 85, 87, 89, 91, 93, 95, 97, 99, 101, 103, 105, 107, 109, 111, 113, 115, 117, 119, 121, 123, 125, 127, 129, 131, 133, 135, 137, 139, 141, 143, 145, 147, 149, 151 and 153). The amino acid sequences of the protein coding regions (open reading frames) were deduced (SEQ ID NOS: 2, 4, 6, 8, 10, 12, 14, 16, 18, 20, 22, 24, 26, 28, 30, 32, 34, 36, 38, 40, 42, 44, 46, 48, 50, 52, 54, 56, 58, 60, 62, 64, 66, 68, 70, 72, 74, 76, 78, 80, 82, 84, 86, 88, 90, 92, 94, 96, 98, 100, 102, 104, 106, 108, 110, 112, 114, 116, 118, 120, 122, 124, 126, 128, 130, 132, 134, 136, 138, 140, 142, 144, 146, 148, 150, 152 and 154).

### Example 3

### Screening Compounds Inhibiting Activation of MAP Kinase Cascade, in Particular, p38 Signal

[0217] 293-EBNA cells were seeded on DMEM medium containing 5% FBS in a 96-well cell culture plate to a final cell density of 1×10⁴ cells/100 μl medium/well, and cultured for 24 hours at 37° C. in the presence of 5% CO₂. Then, 10 ng of the plasmid containing the gene encoding MKK3, a protein known to act to activate MAP kinase cascade, obtained by the screening in Example 2 and 60 ng of pFR-Luc (purchased from STRATAGENE), 0.25 ng pFA2-Elk1 (purchased from STRATAGENE), 5 ng of pcDNA3.1 (+) (INVITROGEN) into which human p38 had been incorporated were cotransfected into the cells in a well using FuGENE 6. Within 1 hour, SB203580 (purchased from CALBIOCHEM) which is known to be an inhibitor of p38, which is one kind of MAP kinase, was added to the culture to a final concentration of 0.082-20 μM. After 24 hours of culture at 37° C., the reporter activity was measured using PIKKA GENE LT2.0. The results showed that SB203580 inhibited the expression of the reporter gene to a level of IC50 is about 0.4 μM (FIG. 1).

### Example 4

### Measurement of Reporter Activity Corrected using an Internal Control

[0218] 293-EBNA cells (purchased from INVITROGEN) were inoculated on a 5% FBS (Fetal Bovine Serum)-containing DMEM medium in a 96-well cell culture plate to a final cell density of 1×10⁴ cells/well, and cultured for 24 hours at 37° C. (in the presence of 5% CO₂). Then, using FuGENE 6 (purchased from Roche), 12.5 ng, 25 ng, 50 ng and 100 ng of each of the expression plasmids obtained in Example 2 above which comprise a gene encoding the MAP kinase cascade activating protein according to SEQ ID NO: 4, 6, 12, 16, 18, 22, 26, 28, 30, 44, 50, 52, 60, 68, 72, 104, 110, 112, 116, 122, 132, 142, 146, 148, 150, 152 or 154 were respectively co-transfected in a well with 60 ng of pFR-Luc (purchased from STRATAGENE), 0.25 ng of pFA2-Elk1 (STRATAGENE), 5 ng of pcDNA 3.1 (+) (INVITROGEN) into which human p38 gene had been incorporated, 30 ng of pcDNA 3.1 (+) (INVITROGEN) into which human JNJ 1 β 1 gene had been incorporated, and 10 ng of pRL-tk (purchased from Toyo Ink) as a reporter gene for internal control use. The method used for introduction was in accordance with the attached protocol. After culturing for 24 hours at 37° C., reporter activity (firefly luciferase acitivity), which reflects MAP kinase cascade activation, and reporter activity being the internal control (sea pansy luciferase) were measured using Picagene Dual (purchased from Toyo Ink Manufacturing) in accordance with the manufacturer's instructions.

[0219] Luciferase activity was measured with Perkin Elmer's Wallac ARVOTMST 1420 MULTILABEL COUNTER.

[0220] As a result, reporter activity, which reflects MAP kinase cascade activation corrected with internal control reporter activity, exhibited increases that were dependent on the amount of expression plasmid comprising a gene encoding a MAP kinase cascade activating protein according to SEQ ID NO: 4, 6, 12, 16, 18, 22, 26, 28, 30, 44, 50, 52, 60, 68, 72, 104, 110, 112, 116, 122, 132, 142, 146, 148, 150, 152 or 154 obtained in Example 2 above, as the amount of plasmid introduced was changed through 12.5 ng, 25 ng, 50 ng, and 100 ng, respectively.

[0221] Reporter activity where an expression plasmid comprising the above gene was introduced, which reflects MAP kinase cascade activation corrected with internal control reporter activity, is shown in Table 1, which is expressed as a factor of the same reporter activity where a null vector was introduced (S/B value).

TABLE 1

| SEQ ID NO: | 12.5 ng/well | 25 ng/well | 50 ng/well | 100 ng/well |
|---|---|---|---|---|
| 26 | ND | 1.6 | 3.2 | 4.1 |
| 12 | ND | 2.1 | 2.7 | 3.9 |
| 4 | ND | 2.1 | 4.1 | 4.5 |
| 28 | ND | 1.8 | 2.3 | 2.9 |
| 30 | ND | 4.2 | 6.3 | 7.6 |
| 50 | ND | 2.3 | 4.3 | 3.8 |
| 142 | ND | 5.3 | 6.6 | 5.8 |
| 68 | ND | 2.3 | 4.0 | 7.3 |
| 60 | ND | 2.0 | 2.6 | 4.2 |
| 52 | ND | 2.3 | 3.6 | 5.4 |
| 146 | ND | 3.5 | 5.6 | 8.8 |
| 148 | ND | 1.6 | 3.4 | 5.0 |
| 72 | ND | 2.2 | 5.9 | 7.7 |
| 44 | ND | 9.1 | 55.4 | 64.5 |
| 22 | ND | 24.2 | 50.8 | 69.3 |
| 16 | ND | 3.4 | 8.4 | 8.1 |
| 6 | ND | 2.1 | 2.4 | 2.9 |
| 18 | ND | 1.8 | 2.3 | 2.9 |
| 104 | 3.8 | 7.0 | 14.7 | ND |
| 110 | 2.3 | 3.4 | 4.7 | ND |
| 116 | 11.9 | 17.3 | 19.9 | ND |
| 122 | 1.8 | 2.9 | 6.8 | ND |
| 132 | 5.6 | 10.1 | 16.6 | ND |
| 112 | 7.6 | 2.2 | 3.1 | ND |
| 150 | 6.7 | 2.8 | 1.7 | ND |

ND: No data

### Example 5

### Screening for Inhibitors

[0222] 293-EBNA cells (INVITROGEN) were inoculated on a 5% FBS (Fetal Bovine Serum)-containing DMEM medium in a 96-well cell culture plate to a final cell density of 1×10⁴ cells/well, and cultured for 24 hours at 37° C. (in the presence of 5% CO₂). Then, using FuGENE6 (Roche), 50 ng of each of the expression plasmids obtained in Example 2 above which comprise a gene encoding the MAP kinase cascade activating protein according to SEQ ID NO: 4, 6, 12, 16, 18, 22, 26, 28, 30, 44, 50, 52, 60, 68, 72, 104, 110, 112, 116, 122, 132, 142, 146, 148, 150, 152 or 154 were respectively co-transfected in a well with 60 ng of pFR-Luc (STRATAGENE), 0.25 ng of pFA2-Elk1 (STRATAGENE), 5 ng of pcDNA 3.1 (+) (INVITROGEN) into which human p38 gene had been incorporated and 30 ng of pcDNA 3.1 (+) (INVITROGEN) into which human JNJ1 β 1 gene had been incorporated. The method used for introduction was in accordance with the attached protocol. After culturing for 2 hours at 37° C., any one of 1000 types of compound that were held in stock, was added to a final concentration of 10 μM per well, and after further culturing for 24 hours at 37° C., reporter activity, which reflects MAP kinase cascade activition, was measured by Picagene LT2 (purchased from Toyo Ink Manufacturing) in accordance with the manufacturer's instructions. Using a well to which no compound was added as a control, compounds were screened to identify a compound which reduced reporter activity in the well to which it was added to 50% or lower. As a result, in systems to which was introduced an expression plasmid comprising a gene encoding the MAP kinase cascade activating protein according to SEQ ID NO: 4, 6, 12, 16, 18, 22, 26, 28, 30, 44, 50, 52, 60, 68, 72, 104, 110, 112, 116, 122, 132, 142, 146, 148, 150, 152 or 154, staurosporine, which is known to inhibit the activity of various kinases non-specifically, was obtained as an inhibitor. The structural formula of the staurosporine obtained here is shown in FIG. 2.

### EFFECTS OF THE INVENTION

[0223] As described above, the present invention provides proteins capable of phosphorylating Elk1 and/or activating a kinase which phosphorylates Elk1, and genes encoding the proteins. These proteins and genes are highly likely to posses highly industrially useful MAP kinase cascade activating activity. The proteins of the present invention and the genes encoding the proteins allow not only screening for compounds useful for treating and preventing diseases associated with the excessive activation or inhibition of MAP kinase cascade, but also production of diagnostics for such diseases. The genes of the present invention are also useful as a gene source used for gene therapy.

1. A purified protein selected from the group consisting of:
(a) a protein which consists of an amino acid sequence selected from the group consisting of SEQ ID NOS: 2, 4, 6, 8, 10, 12, 14, 16, 18, 20, 22, 24, 26, 28, 30, 32, 34, 36, 38, 40, 42, 44, 46, 48, 50, 52, 54, 56, 58, 60, 62, 64, 66, 68, 70, 72, 74, 76, 78, 80, 82, 84, 86, 88, 90, 92, 94, 96, 98, 100, 102, 104, 106, 108, 110, 112, 114, 116, 118, 120, 122, 124, 126, 128, 130, 132, 134, 136, 138, 140, 142, 144, 146, 148, 150, 152 and 154; and
(b) a protein that acts to phosphorylate Elk1 and/or activate a kinase which phosphorylates Elk1, and consists of an amino acid sequence having at least one amino acid deletion, substitution or addition in an amino acid sequence selected from the group consisting of SEQ ID NOS: 2, 4, 6, 8, 10, 12, 14, 16, 18, 20, 22, 24, 26, 28, 30, 32, 34, 36, 38, 40, 42, 44, 46, 48, 50, 52, 54, 56, 58, 60, 62, 64, 66, 68, 70, 72, 74, 76, 78, 80, 82, 84, 86, 88, 90, 92, 94, 96, 98, 100, 102, 104, 106, 108, 110, 112, 114, 116, 118, 120, 122, 124, 126, 128, 130, 132, 134, 136, 138, 140, 142, 144, 146, 148, 150, 152 and 154.

2. A purified protein that acts to phosphorylate Elk1 and/or activate a kinase which phosphorylates Elk1, and comprises an amino acid sequence having at least 95% identity to the protein according to claim 1 over the entire length thereof.

3. An isolated polynucleotide which comprises a nucleotide sequence encoding a protein selected from the group consisting of:
(a) a protein which comprises an amino acid sequence selected from the group consisting of SEQ ID NOS: 2, 4, 6, 8, 10, 12, 14, 16, 18, 20, 22, 24, 26, 28, 30, 32, 34, 36, 38, 40, 42, 44, 46, 48, 50, 52, 54, 56, 58, 60, 62, 64, 66, 68, 70, 72, 74, 76, 78, 80, 82, 84, 86, 88, 90, 92, 94, 96, 98, 100, 102, 104, 106, 108, 110, 112, 114, 116, 118, 120, 122, 124, 126, 128, 130, 132, 134, 136, 138, 140, 142, 144, 146, 148, 150, 152 and 154; and
(b) a protein that acts to phosphorylate Elk1 and/or activate a kinase which phosphorylates Elk1, and consists of an amino acid sequence having at least one amino acid deletion, substitution or addition in an amino acid sequence selected from the group consisting of SEQ ID NOS: 2, 4, 6, 8, 10, 12, 14, 16, 18, 20, 22, 24, 26, 28, 30, 32, 34, 36, 38, 40, 42, 44, 46, 48, 50, 52, 54, 56, 58, 60, 62, 64, 66, 68, 70, 72, 74, 76, 78, 80, 82, 84, 86, 88, 90, 92, 94, 96, 98, 100, 102, 104, 106, 108, 110, 112, 114, 116, 118, 120, 122, 124, 126, 128, 130, 132, 134, 136, 138, 140, 142, 144, 146, 148, 150, 152 and 154.

4. An isolated polynucleotide comprising a polynucleotide sequence selected from the group consisting of:
(a) a polynucleotide sequence represented by SEQ ID NOS: 1, 3, 5, 7, 9, 11, 13, 15, 17, 19, 21, 23, 25, 27, 29, 31, 33, 35, 37, 39, 41, 43, 45, 47, 49, 51, 53, 55, 57, 59, 61, 63, 65, 67, 69, 71, 73, 75, 77, 79, 81, 83, 85, 87, 89, 91, 93, 95, 97, 99, 101, 103, 105, 107, 109, 111, 113, 115, 117, 119, 121, 123, 125, 127, 129, 131, 133, 135, 137, 139, 141, 143, 145, 147, 149, 151 and 153; and a polynucleotide sequence complementary to said polynucleotide sequence;
(b) a polynucleotide sequence which encodes a protein that acts to phosphorylate Elk1 and/or activate a kinase which phosphorylates Elk1, and which hybridizes under stringent conditions with a polynucleotide having a polynucleotide sequence that is complementary to the polynucleotide sequence of (a);
(c) a polynucleotide sequence encoding a protein that acts to phosphorylate Elk1 and/or activate a kinase which phosphorylates Elk1, and consists of a nucleotide sequence having at least one nucleotide deletion, substitution or addition in a nucleotide sequence selected from the group consisting of SEQ ID NOS: 1, 3, 5, 7, 9, 11, 13, 15, 17, 19, 21, 23, 25, 27, 29, 31, 33, 35, 37, 39, 41, 43, 45, 47, 49, 51, 53, 55, 57, 59, 61, 63, 65, 67, 69, 71, 73, 75, 77, 79, 81, 83, 85, 87, 89, 91, 93, 95, 97, 99, 101, 103, 105, 107, 109, 111, 113, 115, 117, 119, 121, 123, 125, 127, 129, 131, 133, 135, 137, 139, 141, 143, 145, 147, 149, 151 and 153.

5. An isolated polynucleotide comprising a nucleotide sequence which encodes a protein that acts to phosphorylate Elk1 and/or activate a kinase which phosphorylates Elk1, and has at least 95% identity to the polynucleotide sequence according to claim 3 over the entire length thereof.

6. An isolated polynucleotide comprising a nucleotide sequence which encodes a protein that acts to phosphorylate Elk1 and/or activate a kinase which phosphorylates Elk1, and has at least 95% identity to the polynucleotide sequence according to claim 4 over the entire length thereof.

7. A purified protein encoded by the polynucleotide according to any one of claims 3 to 6.

8. A recombinant vector which comprises a polynucleotide according to any one of claims 3 to 6.

9. A transformed cell which comprises the recombinant vector according to claim 8.

10. A membrane of the cell according to claim 9, when the protein according to claim 1, 2 or 7 is a membrane protein.

11. A process for producing a protein comprising:
(a) culturing a transformed cell comprising the isolated polynucleotide according to any one of claims 3 to 6 under conditions providing expression of the encoded protein; and
(b) recovering the protein from the culture.

12. A process for diagnosing a disease or susceptibility to a disease in a subject related to expression or activity of the protein of claim 1, 2 or 7 in the subject, comprising:
(a) determining the presence or absence of a mutation in the nucleotide sequence encoding said protein in the genome of said subject; and/or
(b) analyzing the amount of expression of said protein in a sample derived from said subject.

13. A method for screening compounds for inhibiting or promoting activity for Elk1 phosphorylation action and/or a kinase which phosphorylates Elk1, which comprises the steps of:
(a) providing a cell with a gene encoding a protein that acts to phosphorylate Elk1 and/or activate a kinase which phosphorylates Elk1, and a component that provides a detectable signal associated with Elk1 phosphorylation action and/or a kinase which phosphorylates Elk1;
(b) culturing a transformed cell under conditions, which permit the expression of the gene in the transformed cell;
(c) contacting the transformed cell with one or more compounds;
(d) measuring the detectable signal; and
(e) isolating or identifying a compound as an activator compound or an inhibitor compound according to measurement of the detectable signal.

14. A process for producing a pharmaceutical composition, which comprises the steps of:
(a) providing a cell with a gene encoding a protein that acts to phosphorylate Elk1 and/or activate a kinase which phosphorylates Elk1, and a component capable of providing a detectable signal;
(b) culturing a transformed cell under conditions, which permit the expression of the gene in the transformed cell;
(c) contacting the transformed cell with one or more compounds;
(d) measuring the detectable signal;
(e) isolating or identifying a compound as an activator compound or an inhibitor compound according to measurement of the detectable signal; and
(f) optimizing the isolated or identified compound for a pharmaceutical composition.

15. A kit for screening a compound for inhibiting or promoting activity for Elk1 phosphorylation action and/or a kinase which phosphorylates Elk1, which comprises:
(a) a cell transformed with a gene encoding a protein that acts to phosphorylate Elk1 and/or activate a kinase which phosphorylates Elk1, and a component that provides a detectable signal upon activation of Elk1 phosphorylation action and/or a kinase which phosphorylates Elk1; and
(b) reagents for measuring the detectable signal.

16. A monoclonal or polyclonal antibody that reacts with the protein according to claim 1, 2 or 7.

17. A process for producing a monoclonal or polyclonal antibody that reacts with the protein of claim 1, 2 or 7, which comprises administering the protein according to claim 1, 2 or 7 or epitope-bearing fragments thereof to a non-human animal.

18. An antisense oligonucleotide complementary to at least a part of the polynucleotide according to any one of claims 3 to 6, which prevents expression of a protein which phosphorylates Elk1 and/or activates a kinase which phosphorylates Elk1.

19. A ribozyme which inhibits activation of Elk1 phosphorylation action and/or a kinase which phosphorylates Elk1 by cleavage of RNA that encodes the protein of claim 1, 2 or 7.

20. A method for treating a disease, which comprises administering to a subject an effective amount of a compound screened by the process according to claim 13, and/or a monoclonal or polyclonal antibody according to clam 16, and/or an antisense oligonucleotide according to claim 18 and/or a ribozyme according to claim 19 for treating a disease selected from the group consisting of inflammation, autoimmune diseases, cancers, viral infections, GVHD, skin diseases, IgA nephritis, purpuric nephritis, proliferative nephritides, and fulminant hepatitis.

21. A pharmaceutical composition produced according to claim 14 for inhibiting or promoting Elk1 phosphorylation action and/or a kinase which phosphorylates Elk1.

22. A pharmaceutical composition according to claim 21 for the treatment of inflammation, autoimmune diseases, cancers, viral infections, GVHD, skin diseases, IgA nephritis, purpuric nephritis, proliferative nephritides, and/or fulminant hepatitis.

23. A method of treating inflammation, autoimmune diseases, cancers, viral infections, GVHD, skin diseases, IgA nephritis, purpuric nephritis, proliferative nephritides, and/or fulminant hepatitis, which comprising administering a pharmaceutical composition produced according to claim 14 to a patient suffering from a disease relating to abnormalities in Elk1 phosphorylation action and/or activation of kinase which phosphorylates Elk1.

24. A pharmaceutical composition which comprises a monoclonal or polyclonal antibody according to claim 16 as an active ingredient.

25. A pharmaceutical composition which comprises an antisense oligonucleotide according to claim 18 as an active ingredient.

26. A pharmaceutical composition according to claim 24 or 25, wherein a target disease is selected from the group consisting of inflammation, autoimmune diseases, cancers, viral infections, GVHD, skin diseases, IgA nephritis, purpuric nephritis, proliferative nephritides, and fulminant hepatitis.

27. A computer-readable medium on which a sequence data set has been stored, said sequence data set comprising at least one nucleotide sequence selected from the group, consisting of SEQ ID NOS: 1, 3, 5, 7, 9, 11, 13, 15, 17, 19, 21, 23, 25, 27, 29, 31, 33, 35, 37, 39, 41, 43, 45, 47, 49, 51, 53, 55, 57, 59, 61, 63, 65, 67, 69, 71, 73, 75, 77, 79, 81, 83, 85, 87, 89, 91, 93, 95, 97, 99, 101, 103, 105, 107, 109, 111, 113, 115, 117, 119, 121, 123, 125, 127, 129, 131, 133, 135, 137, 139, 141, 143, 145, 147, 149, 151 and 153; and/or at least one amino acid sequence selected from the group consisting of SEQ ID NOS: 2, 4, 6, 8, 10, 12, 14, 16, 18, 20, 22, 24, 26, 28, 30, 32, 34, 36, 38, 40, 42, 44, 46, 48, 50, 52, 54, 56, 58, 60, 62, 64, 66, 68, 70, 72, 74, 76, 78, 80, 82, 84, 86, 88, 90, 92, 94, 96, 98, 100, 102, 104, 106, 108, 110, 112, 114, 116, 118, 120, 122, 124, 126, 128, 130, 132, 134, 136, 138, 140, 142, 144, 146, 148, 150, 152 and 154.

28. A method for calculating identity to other nucleotide sequences and/or amino acid sequences, which comprises comparing data on the medium according to claim 27 with data of said other nucleotide sequences and/or amino acid sequences.

29. An insoluble substrate to which polynucleotide comprising all or part of the nucleotide sequences selected from the group consisting of SEQ ID NOS: 1, 3, 5, 7, 9, 11, 13, 15, 17, 19, 21, 23, 25, 27, 29, 31, 33, 35, 37, 39, 41, 43, 45, 47, 49, 51, 53, 55, 57, 59, 61, 63, 65, 67, 69, 71, 73, 75, 77, 79, 81, 83, 85, 87, 89, 91, 93, 95, 97, 99, 101, 103, 105, 107, 109, 111, 113, 115, 117, 119, 121, 123, 125, 127, 129, 131, 133, 135, 137, 139, 141, 143, 145, 147, 149, 151 and 153 are fixed.

30. An insoluble substrate to which polypeptides comprising all or a part of the amino acid sequences selected from the group consisting of SEQ ID NOS: 2, 4, 6, 8, 10, 12, 14, 16, 18, 20, 22, 24, 26, 28, 30, 32, 34, 36, 38, 40, 42, 44, 46, 48, 50, 52, 54, 56, 58, 60, 62, 64, 66, 68, 70, 72, 74, 76, 78, 80, 82, 84, 86, 88, 90, 92, 94, 96, 98, 100, 102, 104, 106, 108, 110, 112, 114, 116, 118, 120, 122, 124, 126, 128, 130, 132, 134, 136, 138, 140, 142, 144, 146, 148, 150, 152 and 154 are fixed.

The application's sequence listing, which the Patent Office published only in electronic form, follows.

SEQUENCE LISTING (156 sequences)

SEQ ID NO: 1 - DNA, 1903 bp, Homo sapiens
  CDS (116)..(1480)
agtcccggctgcagcacctgggagaaggcagaccgtgtgagggggcctgtggccccagcgtgctgtggcctcggggagtgggaagtggaggcaggagccttccttacacttcgccatgagtttcctcatcgactccagcatcatgattacctcccagatactattttttggatttgggtggcttttcttcatgcgccaattgtttaaagactatgagatacgtcagtatgttgtacaggtgatcttctccgtgacgtttgcattttcttgcaccatgtttgagctcatcatctttgaaatcttaggagtattgaatagcagctcccgttattttcactggaaaatgaacctgtgtgtaattctgctgatcctggttttcatggtgcctttttacattggctattttattgtgagcaatatccgactactgcataaacaacgactgcttttttcctgtctcttatggctgacctttatgtatttcttctggaaactaggagatccctttcccattctcagcccaaaacatgggatcttatccatagaacagctcatcagccgggttggtgtgattggagtgactctcatggctcttctttctggatttggtgctgtcaactgcccatacacttacatgtcttacttcctcaggaatgtgactgacacggatattctagccctggaacggcgactgctgcaaaccatggatatgatcataagcaaaaagaaaaggatggcaatggcacggagaacaatgttccagaagggggaagtgcataacaaaccatcaggtttctggggaatgataaaaagtgttaccacttcagcatcaggaagtgaaaatcttactcttattcaacaggaagtggatgctttggaagaattaagcaggcagctttttctggaaacagctgatctatatgctaccaaggagagaatagaatactccaaaaccttcaaggggaaatattttaattttcttggttactttttctctatttactgtgtttggaaaattttcatggctaccatcaatattgtttttgatcgagttgggaaaacggatcctgtcacaagaggcattgagatcactgtgaattatctgggaatccaatttgatgtgaagttttggtcccaacacatttccttcattcttgttggaataatcatcgtcacatccatcagaggattgctgatcactcttaccaagttcttttatgccatctctagcagtaagtcctccaatgtcattgtcctgctattagcacagataatgggcatgtactttgtctcctctgtgctgctgatccgaatgagtatgcctttagaataccgcaccataatcactgaagtccttggagaactgcagttcaacttctatcaccgttggtttgatgtgatcttcctggtcagcgctctctctagcatactcttcctctatttggctcacaaacaggcaccagagaagcaaatggcaccttgaacttaagcctactacagactgttagaggccagtggtttcaaaatttagatataagaggggggaaaaatggaaccagggcctgacattttataaacaaacaaaatgctatggtagcatttttcaccttcatagcatactccttccccgtcaggtgatactatgaccatgagtagcatcagccagaacatgagagggagaactaactcaagacaatactcagcagagagcatcccgtgtggatatgaggctggtgtagaggcggagaggagccaagaaactaaaggtgaaaaatacactggaactctggggcaagacatgtctatggtagctgagccaaacacgtaggatttccgttttaaggttcacatggaaaaggttatagctttgccttgagattgactcattaaaatcagagactgt

SEQ ID NO: 2 - protein, 455 aa, Homo sapiens
MSFLIDSSIMITSQILFFGFGWLFFMRQLFKDYEIRQYVVQVIFSVTFAFSCTMFELIIFEILGVLNSSSRYFHWKMNLCVILLILVFMVPFYIGYFIVSNIRLLHKQRLLFSCLLWLTFMYFFWKLGDPFPILSPKHGILSIEQLISRVGVIGVTLMALLSGFGAVNCPYTYMSYFLRNVTDTDILALERRLLQTMDMIISKKKRMAMARRTMFQKGEVHNKPSGFWGMIKSVTTSASGSENLTLIQQEVDALEELSRQLFLETADLYATKERIEYSKTFKGKYFNFLGYFFSIYCVWKIFMATINIVFDRVGKTDPVTRGIEITVNYLGIQFDVKFWSQHISFILVGIIIVTSIRGLLITLTKFFYAISSSKSSNVIVLLLAQIMGMYFVSSVLLIRMSMPLEYRTIITEVLGELQFNFYHRWFDVIFLVSALSSILFLYLAHKQAPEKQMAP

SEQ ID NO: 3 - DNA, 1781 bp, Homo sapiens
  CDS (91)..(1203)
attggccatcaccgcgcggccgcgcagcggacaccgtgcgtaccggcctgcggcgcccggccaccggggcggaccgcggaacccgaggccatgtcccatgaaaagagttttttggtgtctggggacaactatcctccccccaaccctggatatccgggggggccccagccacccatgcccccctatgctcagcctccctaccctggggccccttacccacagccccctttccagccctccccctacggtcagccagggtacccccatggccccagcccctacccccaagggggctacccacagggtccctacccccaagggggctacccacagggcccctacccacaagagggctacccacagggcccctacccccaagggggctacccccaggggccatatccccagagccccttcccccccaacccctatggacagccacaggtcttcccaggacaagaccctgactcaccccagcatggaaactaccaggaggagggtcccccatcctactatgacaaccaggacttccctgccaccaactgggatgacaagagcatccgacaggccttcatccgcaaggtgttcctagtgctgaccttgcagctgtcggtgaccctgtccacggtgtctgtgttcacttttgttgcggaggtgaagggctttgtccgggagaatgtctggacctactatgtctcctatgctgtcttcttcatctctctcatcgtcctcagctgttgtggggacttccggcgaaagcacccctggaaccttgttgcactgtcggtcctgaccgccagcctgtcgtacatggtggggatgatcgccagcttctacaacaccgaggcagtcatcatggccgtgggcatcaccacagccgtctgcttcaccgtcgtcatcttctccatgcagacccgctacgacttcacctcatgcatgggcgtgctcctggtgagcatggtggtgctcttcatcttcgccattctctgcatcttcatccggaaccgcatcctggagatcgtgtacgcctcactgggcgctctgctcttcacctgcttcctcgcagtggacacccagctgctgctggggaacaagcagctgtccctgagcccagaagagtatgtgtttgctgcgctgaacctgtacacagacatcatcaacatcttcctgtacatcctcaccatcattggccgcgccaaggagtagccgagctccagctcgctgtgcccgctcaggtggcacggctggcctggaccctgcccctggcacggcagtgccagctgtacttcccctctctcttgtccccaggcacagcctagggaaaaggatgcctctctccaaccctcctgtatgtacactgcagatacttccatttggacccgctgtggccacagcatggcccctttagtcctcccgcccccgccaaggggcagcaaggccacgtttccgtgccacctcctgtctactcattgttgcatgagccctgtctgccagcccaccccagggactgggggcagcaccaggtcccggggagagggattgagccaagaggtgagggtgcacgtcttccctcctgtcccagctccccagcctggcgtagagcacccctcccctcccccccacccccctggagtgctgccctctggggacatgcggagtgggggtcttatccctgtgctgagccctgagggcagagaggatggcatgtttcaggggagggggaagccttcctctcaatttgttgtcagtgaaattccaataaatgggatttgctctctgcc

SEQ ID NO: 4 - protein, 371 aa, Homo sapiens
MSHEKSFLVSGDNYPPPNPGYPGGPQPPMPPYAQPPYPGAPYPQPPFQPSPYGQPGYPHGPSPYPQGGYPQGPYPQGGYPQGPYPQEGYPQGPYPQGGYPQGPYPQSPFPPNPYGQPQVFPGQDPDSPQHGNYQEEGPPSYYDNQDFPATNWDDKSIRQAFIRKVFLVLTLQLSVTLSTVSVFTFVAEVKGFVRENVWTYYVSYAVFFISLIVLSCCGDFRRKHPWNLVALSVLTASLSYMVGMIASFYNTEAVIMAVGITTAVCFTVVIFSMQTRYDFTSCMGVLLVSMVVLFIFAILCIFIRNRILEIVYASLGALLFTCFLAVDTQLLLGNKQLSLSPEEYVFAALNLYTDIINIFLYILTIIGRAKE

SEQ ID NO: 5 - DNA, 2426 bp, Homo sapiens
  CDS (104)..(1969)
gcgccagcaggaagtgggagaagaggcgacccaaggcgggctggcgggctggcggcagtcgctacttgcctagtagcctcagccgctgtgggctcctggggagatggaggggccggggctgggctcgcagtgcaggaatcacagccatggcccccaccctccaggatttggtcgatatggcatctgtgcacatgaaaacaaagaacttgccaatgcaagagaagctcttcctcttatagaggactctagtaactgtgacattgtcaaagctactcaatacggaatttttgaacgatgtaaagagttggtagaagcaggatatgatgtcaggcaaccagataaagaaaatgtgtcgcttcttcattgggctgctattaacaacagactggatcttgtaaagttttatatttcaaaaggtgctgttgtagatcagttgggtggagatttaaattcaactcctcttcactgggccatccgacaaggacatttacctatggtcatattattactccagcatggtgcagaccccactcttattgatggagagggattcagcagcatccacctggcagtattgtttcaacacatgcctattatagcatatctcatctcaaagggacagagtgtgaatatgacagatgtaaatgggcagacacctctcatgttatcagctcacaaagtaattgggccagaaccaactggatttcttttaaagtttaatccttctctcaatgtggttgataaaatacaccaaaacactccacttcactgggcagttgcagcaggaaatgttaatgcagttgataagcttttggaagctggttctagcctggatatccagaatgttaagggagaaacacctcttgatatggctctacaaaacaaaaatcagctcattattcatatgctaaaaacagaagccaaaatgagagccaaccaaaagttcagactttggaggtggctgcagaaatgcgagctcttcctgctgctgatgctttctgtgattaccatgtgggctattggatacatattggacttcaattcagattcttggcttttaaaaggatgtcttctagtaacactgttttttctgacatctttgtttccaaggttcttggttgggtataagaaccttgtatacttaccaacagcctttctgctaagttctgttttttggatatttatgacttggttcatcttattttttcctgatttagcaggagcccctttctatttcagtttcattttcagcatagtagcctttctatactttttctataagacttgggcaactgatccaggcttcactaaggcttctgaagaagaaaagaaagtgaatatcatcacccttgcagaaactggctctctggacttcagaacattttgtacatcatgtcttataaggaagccattaaggtcactccactgccatgtatgcaactgctgtgtggctcgatatgatcaacactgcctgtggactggacggtgcataggttttggcaaccatcactattacatattcttcttgtttttcctttccatggtatgtggctggattatatatggatctttcatctatttgtccagtcattgtgccacaacattcaaagaagatggattatggacttacctcaatcagattgtggcctgttccccttgggttttatatatcttgatgctagcaactttccatttctcatggtcaacatttttattattaaatcaactctttcagattgcctttctgggcctgacctcccatgagagaatcagcctgcagaagcagagcaagcatatgaaacagacgttgtccctcaggaagacaccatacaatcttggattcatgcagaacctggcagatttctttcagtgtggctgctttggcttggtgaagccctgtgtggtagattggacatcacagtacaccatggtctttcacccagccagggagaaggttcttcgctcagtatgaagaaaagcaacccaaaactctcaatctgatttgtttttgtttatgtcgatgccctgtagtttgaaagtgaagtaaagatttagaattcacctaagtccaaaggaaaacacgtggtttttaaagccattaggtaaaaaaagttctcaataaaggcattacaattttttaggtttagaaagatggacttttctgataaatcttggcagacatctaaaaaaaaaaccatatttttcacaagaaaatgcaagttactttttttggaaataatactcactgattatggataaaatggaatattttcagatactatattggctgtttcaaaatagtactattctttaaacttgtaatttttgctaagttatttgtctttgttgtatctataaatatgtaaaaaatatttaaatagatgtacctgttttgctttcacacttaataaaaaatttttttttgt

SEQ ID NO: 6 - protein, 622 aa, Homo sapiens
MEGPGLGSQCRNHSHGPHPPGFGRYGICAHENKELANAREALPLIEDSSNCDIVKATQYGIFERCKELVEAGYDVRQPDKENVSLLHWAAINNRLDLVKFYISKGAVVDQLGGDLNSTPLHWAIRQGHLPMVILLLQHGADPTLIDGEGFSSIHLAVLFQHMPIIAYLISKGQSVNMTDVNGQTPLMLSAHKVIGPEPTGFLLKFNPSLNVVDKIHQNTPLHWAVAAGNVNAVDKLLEAGSSLDIQNVKGETPLDMALQNKNQLIIHMLKTEAKMRANQKFRLWRWLQKCELFLLLMLSVITMWAIGYILDFNSDSWLLKGCLLVTLFFLTSLFPRFLVGYKNLVYLPTAFLLSSVFWIFMTWFILFFPDLAGAPFYFSFIFSIVAFLYFFYKTWATDPGFTKASEEEKKVNIITLAETGSLDFRTFCTSCLIRKPLRSLHCHVCNCCVARYDQHCLWTGRCIGFGNHHYYIFFLFFLSMVCGWIIYGSFIYLSSHCATTFKEDGLWTYLNQIVACSPWVLYILMLATFHFSWSTFLLLNQLFQIAFLGLTSHERISLQKQSKHMKQTLSLRKTPYNLGFMQNLADFFQCGCFGLVKPCVVDWTSQYTMVFHPAREKVLRSV

SEQ ID NO: 7 - DNA, 2636 bp, Homo sapiens
  CDS (53)..(1060)
cttacttttccatctcctcccacccagctataccctcccactggcggcgcggatggcacgccggcggagccagcgagtctgcgcgagcggtccgagcatgctcaatagcgcgcgcggcgccccggagcttctccgcggaaccgcgaccaacgcggaggtctcggcggccgctgcgggagccacaggaagtgaagagcttccgccgggagaccgcggctgcaggaacggaggcggaaggggccctgcggcgacgacgtcgtcgacgggggtggccgtgggagctgagcacggagaagactccctctctcggaagccggatcccgagccgggcaggatggatcaccaccagccggggactgggcgctaccaggtgcttcttaatgaagaggataactcagaatcatcggctatagagcagccacctacttcaaacccagcaccgcagattgtgcaggctgtgtcttcagcaccagcacttgaaactgactcttcccctccaccatatagtagtattactgtggaagtacctacaacttcagatacagaagtttacggtgagttttatcccgtgccacctccctatagcgttgctacctctcttcctacatacgatgaagctgagaaggctaaagctgctgcaatggcagctgcagcagcagaaacatctcaaagaattcaggaggaagagtgtccaccaagagatgacttcagtgatgcagaccagctcagagtggggaatgatggcattttcatgctggcatttttcatggcatttattttcaactggcttggattttgtttatccttctgtatcaccaataccatagctggaaggtatggtgctatctgcggatttggcctttccttgatcaaatggatccttattgtcaggttttctgattattttactggatatttcaatggacagtattggctttggtggatatttcttgtacttggcctgctccttttcttcagaggatttgttaattatctaaaagtcagaaacatgtctgaaagtatggcagctgctcatagaacaaggtatttcttcttattgtagagactgcatcaacccgacattcctttcttataccaatgtgaaatttccagatcatctgtaaacctacaactttaatagaagactactaataacagaagacaaattagtgaagaaaagacggagtttcgaaattgaatggcagggtggtttttgcttacaagccatttctgttcattctttaagtatctatatttcatttgttttgcacatatgcatatgtgcccatttaagatatttgcatatacttgatagaaaccataaagttgtagcagttaagtccagtcacatttggttaatcagtgtttgatataattgaaagagttgagtggataaacagtcttccagcttgtaaatgccattgacttctgacctgacatttagtataataaaaatgaaattcttaaccatgtcaaatgatttagtttctggctcttagactcatctggcagttctacacatgaaacatcttttgttatataaggtgtattgaaacctgcagtgctgattattagaaaggatttgtcagatttttgaacatgatatttacattattatttaggaaaactcttcctgtaaataaccatgcataacttactttctgcaatgttttcttagaaattgtgtccagatagctttcactaattttaaattaagtgaactaaatatatatgtgtatatgtatacacatatatatacacacacacatatatatatttagaaacgtgagtgttaaagatagaatttgttttaggacaaattttaagaaaatgtgggaataccaaatgtcctttataagaaaaataaattttgttttaagggacataccagttttagggattttcagatgggaagctgcatttttaggattgcccatcttaagagatcttgcaggaagagattgtattagatattatatttatttcatttaagataattttcaaagttaattttctaaataagataattctcatttgtgtttgtcttttaaaaggccaataaaatatctttcagtatcattgtaataattttttagagtttaatttgtaaagcttagcaaataaaatcttgtactatgaatagcttcttgctttatgactttaggattaacttgtaaaaaacatatcctgaactgagatatgcaaaatactcattttcaagttatggaaatgtgtttgtggcatataggactgtggggtctgtgtgtgtagtgagagtgtgtagccactattataactggaatttaatttacattcataaactactatatttcccatcttgcaaatcattttatgtctcatctgtttttcctttcggttatatctttggttttgaataccaacatttaaaatgatggtattttatcttttaaacttaaaaattatttaatacagctatatggaccttataaaattgatttcttatttattattagacattactactaaaaggtacatctaactattcagggacatttttccatttccaaaaaataaaatttattatgctttataacctcttctgtattttctaattttttcattgtctttgataaataaaacagttttgttttgct

SEQ ID NO: 8 - protein, 336 aa, Homo sapiens
MARRRSQRVCASGPSMLNSARGAPELLRGTATNAEVSAAAAGATGSEELPPGDRGCRNGGGRGPAATTSSTGVAVGAEHGEDSLSRKPDPEPGRMDHHQPGTGRYQVLLNEEDNSESSAIEQPPTSNPAPQIVQAVSSAPALETDSSPPPYSSITVEVPTTSDTEVYGEFYPVPPPYSVATSLPTYDEAEKAKAAAMAAAAAETSQRIQEEECPPRDDFSDADQLRVGNDGIFMLAFFMAFIFNWLGFCLSFCITNTIAGRYGAICGFGLSLIKWILIVRFSDYFTGYFNGQYWLWWIFLVLGLLLFFRGFVNYLKVRNMSESMAAAHRTRYFFLL

SEQ ID NO: 9 - DNA, 2636 bp, Homo sapiens
  CDS (53)..(1060)
cttacttttccatctcctcccacccagctataccctcccactggcggcgcggatggcacgccggcggagccagcgagtctgcgcgagcggtccgagcatgctcaatagcgcgcgcggcgccccggagcttctccgcggaaccgcgaccaacgcggaggtctcggcggccgctgcgggagccacaggaagtgaagagcttccgccgggagaccgcggctgcaggaacggaggcggaaggggccctgcggcgacgacgtcgtcgacgggggtggccgtgggagctgagcacggagaagactccctctctcggaagccggatcccgagccgggcaggatggatcaccaccagccggggactgggcgctaccaggtgcttcttaatgaagaggataactcagaatcatcggctatagagcagccacctacttcaaacccagcaccgcagattgtgcaggctgcgtcttcagcaccagcacttgaaactgactcttcccctccaccatatagtagtattactgtggaagtacctacaacttcagatacagaagtttacggtgagttttatcccgtgccacctccctatagcgttgctacctctcttcctacatacgatgaagctgagaaggctaaagctgctgcaatggcagctgcagcagcagaaacatctcaaagaattcaggaggaagagtgtccaccaagagatgacttcagtgatgcagaccagctcagagtggggaatgatggcattttcatgctggcatttttcatggcatttattttcaactggcttggattttgtttatccttctgtatcaccaataccatagctggaaggtatggtgctatctgcggatttggcctttccttgatcaaatggatccttattgtcaggttttctgattattttactggatatttcaatggacagtattggctttggtggatatttcttgtacttggcctgctccttttcttcagaggatttgttaattatctaaaagtcagaaacatgtctgaaagtatggcagctgctcatagaacaaggtatttcttcttattgtagagactgcatcaacccgacattcctttcttataccaatgtgaaatttccagatcatctgtaaacctacaactttaatagaagactactaataacagaagacaaattagtgaagaaaagacggagtttcgaaattgaatggcagggtggtttttgcttacaagccatttctgttcattctttaagtatctatatttcatttgttttgcacatatgcatatgtgcccatttaagatatttgcatatacttgatagaaaccataaagttgtagcagttaagtccagtcacatttggttaatcagtgtttgatataattgaaagagttgagtggataaacagtcttccagcttgtaaatgccattgacttctgacctgacatttagtataataaaaatgaaattcttaaccatgtcaaatgatttagtttctggctcttagactcatctggcagttctacacatgaaacatcttttgttatataaggtgtattgaaacctgcagtgctgattattagaaaggatttgtcagatttttgaacatgatatttacattattatttaggaaaactcttcctgtaaataaccatgcataacttactttctgcaatgttttcttagaaattgtgtccagatagctttcactaattttaaattaagtgaactaaatatatatgtgtatatgtatacacatatatatacacacacacatatatatatttagaaacgtgagtgttaaagatagaatttgttttaggacaaattttaagaaaatgtgggaataccaaatgtcctttataagaaaaataaattttgttttaagggacataccagttttagggattttcagatgggaagctgcatttttaggattgcccatcttaagagatcttgcaggaagagattgtattagatattatatttatttcatttaagataattttcaaagttaattttctaaataagataattctcatttgtgtttgtcttttaaaaggccaataaaatatctttcagtatcattgtaataattttttagagtttaatttgtaaagcttagcaaataaaatcttgtactatgaatagcttcttgctttatgactttaggattaacttgtaaaaaacatatcctgaactgagatatgcaaaatactcattttcaagttatggaaatgtgtttgtggcatataggactgtggggtctgtgtgtgtagtgagagtgtgtagccactattataactggaatttaatttacattcataaactactatatttcccatcttgcaaatcattttatgtctcatctgtttttcctttcggttatatctttggttttgaataccaacatttaaaatgatggtattttatcttttaaacttaaaaattatttaatacagctatatggaccttataaaattgatttcttatttattattagacattactactaaaaggtacatctaactattcagggacatttttccatttccaaaaaataaaatttattatgctttataacctcttctgtattttctaattttttcattgtctttgataaataaaacagttttgttttgct

SEQ ID NO: 10 - protein, 336 aa, Homo sapiens
MARRRSQRVCASGPSMLNSARGAPELLRGTATNAEVSAAAAGATGSEELPPGDRGCRNGGGRGPAATTSSTGVAVGAEHGEDSLSRKPDPEPGRMDHHQPGTGRYQVLLNEEDNSESSAIEQPPTSNPAPQIVQAASSAPALETDSSPPPYSSITVEVPTTSDTEVYGEFYPVPPPYSVATSLPTYDEAEKAKAAAMAAAAAETSQRIQEEECPPRDDFSDADQLRVGNDGIFMLAFFMAFIFNWLGFCLSFCITNTIAGRYGAICGFGLSLIKWILIVRFSDYFTGYFNGQYWLWWIFLVLGLLLFFRGFVNYLKVRNMSESMAAAHRTRYFFLL

SEQ ID NO: 11 - DNA, 2324 bp, Homo sapiens
  CDS (13)..(738)
gagccgggcaggatggatcaccaccagccggggactgggcgctaccaggtgcttcttaatgaagaggataactcagaatcatcggctatagagcagccacctacttcaaacccagcaccgcagattgtgcaggctgcgtcttcagcaccagcacttgaaactgactcttcccctccaccatatagtagtattactgtggaagtacctacaacttcagatacagaagtttacggtgagttttatcccgtgccacctccctatagcgttgctacctctcttcctacatacgatgaagctgagaaggctaaagctgctgcaatggcagctgcagcagcagaaacatctcaaagaattcaggaggaagagtgtccaccaagagatgacttcagtgatgcagaccagctcagagtggggaatgatggcattttcatgctggcatttttcatggcatttattttcaactggcttggattttgtttatccttctgtatcaccaataccatagctggaaggtatggtgctatctgcggatttggcctttccttgatcaaatggatccttattgtcaggttttctgattattttactggatatttcaatggacagtattggctttggtggatatttcttgtacttggcctgctccttttcttcagaggatttgttaattatctaaaagtcagaaacatgtctgaaagtatggcagctgctcatagaacaaggtatttcttcttattgtagagactgcatcaacccgacattcctttcttataccaatgtgaaatttccagatcatctgtaaacctacaactttaatagaagactactaataacagaagacaaattagtgaagaaaagacggagtttcgaaattgaatggcagggtggtttttgcttacaagccatttctgttcattctttaagtatctatatttcatttgttttgcacatatgcatatgtgcccatttaagatatttgcatatacttgatagaaaccataaagttgtagcagttaagtccagtcacatttggttaatcagtgtttgatataattgaaagagttgagtggataaacagtcttccagcttgtaaatgccattgacttctgacctgacatttagtataataaaaatgaaattcttaaccatgtcaaatgatttagtttctggctcttagactcatctggcagttctacacatgaaacatcttttgttatatagggtgtattgaaacctgcagtgctgattattagaaaggatttgtcagatttttgaacatgatatttacattattatttaggaaaactcttcctgtaaataaccatgcataacttactttctgcaatgttttcttagaaattgtgtccagatagctttcactaattttaaattaagtgaactaaatatatatgtgtatatgtatacacatatatatacacacacacatatatatatttagaaacgtgagtgttaaagatagaatttgttttaggacaaattttaagaaaatgtgggaataccaaatgtcctttataagaaaaataaattttattttaagggacatactagttttagggattttcagatgggaagctgcatttttaggattgcccatcttaagagatcttgcaggaagagattgtattagatattatatttatttcatttaagataattttcaaagttaattttctaaataagataattctcatttgtgtttgtcttttaaaaggccaataaaatatctttcagtatcattgtaataattttttagagtttaatttgtaaagcttagcaaataaaatcttgtactatgaatagcttcttgctttatgactttaggattaacttgtaaaaaacatatcctgaactgagatatgcaaaatactcattttcaagttatggaaatgtgtttgtggcatataggactgtggggtctgtgtgtgtagtgagagtgtgtagccactattataactggaatttaatttacattcataaactactatatttcccatcttgcaaatcattttatgtctcatctgtttttcctttcggttatatctttggttttgaataccaacatttaaaatgatggtattttatcttttaaacttaaaaattatttaatacagctatatggaccttataaaattgatttcttatttattattagacattactactaaaaggtacatctaactattcagggacatttttccatttccaaaaaataaaatttattatgctttataacctcttctgtattttctaattttttcattgtctttgataaataaaacagttttgttttgctaatatagcct

SEQ ID NO: 12 - protein, 242 aa, Homo sapiens
MDHHQPGTGRYQVLLNEEDNSESSAIEQPPTSNPAPQIVQAASSAPALETDSSPPPYSSITVEVPTTSDTEVYGEFYPVPPPYSVATSLPTYDEAEKAKAAAMAAAAAETSQRIQEEECPPRDDFSDADQLRVGNDGIFMLAFFMAFIFNWLGFCLSFCITNTIAGRYGAICGFGLSLIKWILIVRFSDYFTGYFNGQYWLWWIFLVLGLLLFFRGFVNYLKVRNMSESMAAAHRTRYFFLL

SEQ ID NO: 13 - DNA, 2324 bp, Homo sapiens
  CDS (13)..(738)
gagccgggcaggatggatcaccaccagccggggactgggcgctaccaggtgcttcttaatgaagaggataactcagaatcatcggctatagagcagccacctacttcaaacccagcaccgcagattgtgcaggctgtgtcttcagcaccagcacttgaaactgactcttcccctccaccatatagtagtattactgtggaagtacctacaacttcagatacagaagtttacggtgagttttatcccgtgccacctccctatagcgttgctacctctcttcctacatacgatgaagctgagaaggctaaagctgctgcaatggcagctgcagcagcagaaacatctcaaagaattcaggaggaagagtgtccaccaagagatgacttcagtgatgcagaccagctcagagtggggaatgatggcattttcatgctggcatttttcatggcatttattttcaactggcttggattttgtttatccttctgtatcaccaataccatagctggaaggtatggtgctatctgcggatttggcctttccttgatcaaatggatccttattgtcaggttttctgattattttactggatatttcaatggacagtattggctttggtggatatttcttgtacttggcctgctccttttcttcagaggatttgttaattatctaaaagtcagaaacatgtctgaaagtatggcagctgctcatagaacaaggtatttcttcttattgtagagactgcatcaacccgacattcctttcttataccaatgtgaaatttccagatcatctgtaaacctacaactttaatagaagactactaataacagaagacaaattagtgaagaaaagacggagtttcgaaattgaatggcagggtggtttttgcttacaagccatttctgttcattctttaagtatctatatttcatttgttttgcacatatgcatatgtgcccatttaagatatttgcatatacttgatagaaaccataaagttgtagcagttaagtccagtcacatttggttaatcagtgtttgatataattgaaagagttgagtggataaacagtcttccagcttgtaaatgccattgacttctgacctgacatttagtataataaaaatgaaattcttaaccatgtcaaatgatttagtttctggctcttagactcatctggcagttctacacatgaaacatcttttgttatatagggtgtattgaaacctgcagtgctgattattagaaaggatttgtcagatttttgaacatgatatttacattattatttaggaaaactcttcctgtaaataaccatgcataacttactttctgcaatgttttcttagaaattgtgtccagatagctttcactaattttaaattaagtgaactaaatatatatgtgtatatgtatacacatatatatacacacacacatatatatatttagaaacgtgagtgttaaagatagaatttgttttaggacaaattttaagaaaatgtgggaataccaaatgtcctttataagaaaaataaattttattttaagggacatactagttttagggattttcagatgggaagctgcatttttaggattgcccatcttaagagatcttgcaggaagagattgtattagatattatatttatttcatttaagataattttcaaagttaattttctaaataagataattctcatttgtgtttgtcttttaaaaggccaataaaatatctttcagtatcattgtaataattttttagagtttaatttgtaaagcttagcaaataaaatcttgtactatgaatagcttcttgctttatgactttaggattaacttgtaaaaaacatatcctgaactgagatatgcaaaatactcattttcaagttatggaaatgtgtttgtggcatataggactgtggggtctgtgtgtgtagtgagagtgtgtagccactattataactggaatttaatttacattcataaactactatatttcccatcttgcaaatcattttatgtctcatctgtttttcctttcggttatatctttggttttgaataccaacatttaaaatgatggtattttatcttttaaacttaaaaattatttaatacagctatatggaccttataaaattgatttcttatttattattagacattactactaaaaggtacatctaactattcagggacatttttccatttccaaaaaataaaatttattatgctttataacctcttctgtattttctaattttttcattgtctttgataaataaaacagttttgttttgctaatatagcct

SEQ ID NO: 14 - protein, 242 aa, Homo sapiens
MDHHQPGTGRYQVLLNEEDNSESSAIEQPPTSNPAPQIVQAVSSAPALETDSSPPPYSSITVEVPTTSDTEVYGEFYPVPPPYSVATSLPTYDEAEKAKAAAMAAAAAETSQRIQEEECPPRDDFSDADQLRVGNDGIFMLAFFMAFIFNWLGFCLSFCITNTIAGRYGAICGFGLSLIKWILIVRFSDYFTGYFNGQYWLWWIFLVLGLLLFFRGFVNYLKVRNMSESMAAAHRTRYFFLL

SEQ ID NO: 15 - DNA, 1448 bp, Homo sapiens
  CDS (292)..(1257)
tactgctggcggctggagcggagcgcaccgcggcggtggtgcccagagcggagcgcagctccctgccccgcccctccccctcggcctcgcggcgacggcggcggtggcggcttggacgactcggagagccgagtgaagacatttccacctggacacctgaccatgtgcctgccctgagcagcgaggcccaccaggcatctctgttgtgggcagcagggccaggtcctggtctgtggaccctcggcagttggcaggctccctctgcagtggggtctgggcctcggccccaccatgtcgagcctcggcggtggctcccaggatgccggcggcagtagcagcagcagcaccaatggcagcggtggcagtggcagcagtggcccaaaggcaggagcagcagacaagagtgcagtggtggctgccgccgcaccagcctcagtggcagatgacacaccaccccccgagcgtcggaacaagagcggtatcatcagtgagcccctcaacaagagcctgcgccgctcccgcccgctctcccactactcttcttttggcagcagtggtggtagtggcggtggcagcatgatgggcggagagtctgctgacaaggccactgcggctgcagccgctgcctccctgttggccaatgggcatgacctggcggcggccatggcggtggacaaaagcaaccctacctcaaagcacaaaagtggtgctgtggccagcctgctgagcaaggcagagcgggccacggagctggcagccgagggacagctgacgctgcagcagtttgcgcagtccacagagatgctgaagcgcgtggtgcaggagcatctcccgctgatgagcgaggcgggtgctggcctgcctgacatggaggctgtggcaggtgccgaagccctcaatggccagtccgacttcccctacctgggcgctttccccatcaacccaggcctcttcattatgaccccggcaggtgtgttcctggccgagagcgcgctgcacatggcgggcctggctgagtaccccatgcagggagagctggcctctgccatcagctccggcaagaagaagcggaaacgctgcggcatgtgcgcgccctgccggcggcgcatcaactgcgagcagtgcagcagttgtaggaatcgaaagactggccatcagatttgcaaattcagaaaatgtgaggaactcaaaaagaagccttccgctgctctggagaaggtgatgcttccgacgggagccgccttccggtggtttcagtgacggcggcggaacccaaagctgccctctccgtgcaatgtcactgctcgtgtggtctccagcaagggattcgggcgaagacaaacggatgcacccgtctttagaaccaaaaatattctctcacagatttcattcctgtttttatatatatattttttgttgtcgttttaacatctccacgtccctagcat

SEQ ID NO: 16 - protein, 322 aa, Homo sapiens
MSSLGGGSQDAGGSSSSSTNGSGGSGSSGPKAGAADKSAVVAAAAPASVADDTPPPERRNKSGIISEPLNKSLRRSRPLSHYSSFGSSGGSGGGSMMGGESADKATAAAAAASLLANGHDLAAAMAVDKSNPTSKHKSGAVASLLSKAERATELAAEGQLTLQQFAQSTEMLKRVVQEHLPLMSEAGAGLPDMEAVAGAEALNGQSDFPYLGAFPINPGLFIMTPAGVFLAESALHMAGLAEYPMQGELASAISSGKKKRKRCGMCAPCRRRINCEQCSSCRNRKTGHQICKFRKCEELKKKPSAALEKVMLPTGAAFRWFQ

SEQ ID NO: 17 - DNA, 1551 bp, Homo sapiens
  CDS (127)..(861)
ggaagtcggccaccttcctccgtcccggccgttagcccagccaagcccagccaagcccagccaagccccgccgatcgcgggcaccggagccagccccgcagcgggtcccgcctgtctgtcacgctgatgcccgtgcagctgtctgagcacccggaatggaatgagtctatgcactccctccggatcagtgtggggggccttcctgtgctggcgtccatgaccaaggccgcggacccccgcttccgcccccgctggaaggtgatcctgacgttctttgtgggtgctgccatcctctggctgctctgctcccaccgcccggcccccggcaggccccccacccacaatgcacacaactggaggctcggccaggcgcccgccaactggtacaatgacacctaccccctgtctcccccacaaaggacaccggctgggattcggtatcgaatcgcagttatcgcagacctggacacagagtcaagggcccaagaggaaaacacctggttcagttacctgaaaaagggctacctgaccctgtcagacagtggggacaaggtggccgtggaatgggacaaagaccatggggtcctggagtcccacctggcggagaaggggagaggcatggagctatccgacctgattgttttcaatgggaaactctactccgtggatgaccggacgggggtcgtctaccagatcgaaggcagcaaagccgtgccctgggtgattctgtccgacggcgacggcaccgtggagaaaggcttcaaggccgaatggctggcagtgcgggagattgtaaggaagcggtggcggctggtgaagcaagtctcacatgtcggcgttcttggccaatggatacaaagataaagaaaatgttgcctttttctaggaactgtcagaaatcctcatgcctttcaagacttctgtgaatgacttgaattttttattccctgcctagggtctgtgaacgaggcctgtctcttccctggggtttctttccatggcctttatttctcctcttccagtgggagttttgcaggctcttctctgtggaaacttcacgagcgttggctgggcctcggcttcgctggagtgtactccagggtgaaggcagagtgggatttgagacccaggtagtggaggaagcgaaggaagtgaacgctgaatgtgacgcatttctgaagagctcagctgtcaccgggcatagcctggaagccccaagtctgttctgactttgcctggctgtctccttgacccgcctcctagatcattgtccttgatgtccaggctgggtcatttaaaatagagatgcaatcaggaaggttgggggacttgggactgtggctgaattgagaccttgctgatgtattcatgtcagcacctgagtcacagcccaggtgcccggaagcagcctcttcgcataggcagtgatttgcgattactttaaagctcaccttttttcttcccctctctgttcgctgctgtcagcataatgattgtgttccttccctatgggatccatctgttttgtaaacaataaagcgtctgagggag

SEQ ID NO: 18 - protein, 245 aa, Homo sapiens
MPVQLSEHPEWNESMHSLRISVGGLPVLASMTKAADPRFRPRWKVILTFFVGAAILWLLCSHRPAPGRPPTHNAHNWRLGQAPANWYNDTYPLSPPQRTPAGIRYRIAVIADLDTESRAQEENTWFSYLKKGYLTLSDSGDKVAVEWDKDHGVLESHLAEKGRGMELSDLIVFNGKLYSVDDRTGVVYQIEGSKAVPWVILSDGDGTVEKGFKAEWLAVREIVRKRWRLVKQVSHVGVLGQWIQR

SEQ ID NO: 19 - DNA, 1916 bp, Homo sapiens
  CDS (117)..(932)
atggtaacggctcggaagcctaggaggctgggccggagggaggcggaggaaccggtgttcgccgccgccgctgcttcagcttattccttgtggcctctgcgggtcctgcctcagccatgatgatccacggcttccagagcagccaccgggatttctgcttcgggccctggaagctgacggcgtccaagacccacatcatgaagtcggcggatgtggagaaattagccgatgaattacatatgccatctctccctgaaatgatgtttggagacaacgttttaagaatccagcatgggtctggctttggaattgagttcaatgctacagatgcgttaagatgtgtaaacaactaccaaggaatgcttaaagtggcctgtgctgaagagtggcaagaaagcaggacggagggtgaacactccaaagaggttattaaaccatatgattggacctatacaacagattataagggaaccttacttggagaatctcttaagttaaaggttgtacctacaacagatcatatagatacagaaaaattgaaagccagagaacagattaagttttttgaagaagttctcctttttgaggatgaacttcatgatcatggagtttcaagcctgagtgtgaagattagagtaatgccttctagctttttcctgctgttgcggtttttcttgagaattgatggggtgcttatcagaatgaatgacacgagactttaccatgaggctgacaagacctacatgttacgagaatatacgtcacgagaaagcaaaatttctagtttgatgcatgttccaccttccctcttcacggaacctaatgaaatatcccagtatttaccaataaaggaagcagtttgtgagaagctaatatttccagaaagaattgatcctaacccagcagactcacaaaaaagtacacaagtggaataaaatgtgatacaacatatactcactatggaatctgactggacaccttggctatttgtaaggggttatttttattatgagaattaattgccttgtttatgtacagattttctgtagccttaaaggaaaaaaaaataaagatcgttacaggcaggtttcactcaactgctatttgtactgtctgtcttcacattcatattccagatttatattttctggagttaaatttggatgatttctaaattatcacaaagtgggacctcagcagtagtgatgtgtgtgtctcatgagcagtgagcacagtctgcattcatcatgaaacactatcttctaccaggaggaggttaatgtaaatcaccaaatcccaatgccttgtgactttcataggattcctgatcatgcatgttgatgtactggctcttcactttgggctttctgatgtttattcacacctttggagagttgcaacttgccacatacgaaattagtctcatagtgtagtgaacttcaaccccaaaattttaaaaatgtatttccccccagttttaaattgcctttgaaatttaaaaaaaaaaatttagacttagtaccagaaccaaaaatacctagatttttggagaacttattacatacatagaaacatgaatatggtttaccwctgtgtgtgtgtgtgtgtgtgtgtgtatacagacttttttttttaacttgttgattcagatgtcttggtccctgaatagtcctagattacttattttgagaattgattgttaaaaattacagggaattaaaataattgcctttttttttttagagggtaagagatgggtagaagagtatgcctctgaaaattttattagtttattcttgtggagaataccaagaaaatgtgtatttgcccattgctaaatatgatatatgccattttgtatttatttgtcccaagtgtctttttttaagaggagaataaacaataaggaattactg

SEQ ID NO: 20 - protein, 272 aa, Homo sapiens
MMIHGFQSSHRDFCFGPWKLTASKTHIMKSADVEKLADELHMPSLPEMMFGDNVLRIQHGSGFGIEFNATDALRCVNNYQGMLKVACAEEWQESRTEGEHSKEVIKPYDWTYTTDYKGTLLGESLKLKVVPTTDHIDTEKLKAREQIKFFEEVLLFEDELHDHGVSSLSVKIRVMPSSFFLLLRFFLRIDGVLIRMNDTRLYHEADKTYMLREYTSRESKISSLMHVPPSLFTEPNEISQYLPIKEAVCEKLIFPERIDPNPADSQKSTQVE

SEQ ID NO: 21 - DNA, 2948 bp, Homo sapiens
  CDS (14)..(1879)
atttaacaccaagatggcggacggcccggatgagtacgataccgaagcgggctgtgtgccccttctccacccagaggaaatcaaaccccaaagccattataaccatggatatggtgaacctcttggacggaaaactcatattgatgattacagcacatgggacatagtcaaggctacacaatatggaatatatgaacgctgtcgagaattggtggaagcaggttatgatgtacggcaaccggacaaagaaaatgttaccctcctccattgggctgccatcaataacagaatagatttagtcaaatactatatttcgaaaggtgctattgtggatcaacttggaggggacctgaattcaactccattgcactgggccacaagacaaggccatctatccatggttgtgcaactaatgaaatatggtgcagatccttcattaattgatggagaaggatgtagctgtattcatctggctgctcagttcggacatacctcaattgttgcttatctcatagcaaaaggacaggatgtagatatgatggatcagaatggaatgacgcctttaatgtgggcagcatatagaacacatagtgtggatccaactagattgcttttaacattcaatgtttcagttaaccttggtgacaagtatcacaaaaacactgctctgcattgggcagtgctagcagggaataccacagtcattagccttcttctggaagctggagctaatgttgatgcccagaatatcaagggcgaatcagcgcttgatttggcaaaacagagaaaaaatgtgtggatgatcaaccacttacaagaggcaaggcaagcaaaaggatatgacaatccgtccttccttagaaagctgaaagctgataaggaatttcggcagaaagtaatgttaggaactcctttcctagttatttggctggttgggtttatagcagacctaaatattgattcttggctcattaaagggctaatgtatggtggtgtttgggctacagtacagtttctttcaaaatcctttttcgatcattcaatgcatagtgcattgccccttgggatatatttggcaaccaaattctggatgtatgtgacgtggttcttctggttttggaatgatctcaactttttatttatccatcttccattccttgccaatagtgttgcacttttctacaattttggaaaatcttggaaatcagatccagggattattaaagcaacagaagagcaaaagaaaaagacaatagttgaacttgcagagacaggaagtctggacctcagtatattctgcagtacctgtttgatacgaaaaccggtgaggtccaaacattgtggtgtgtgcaaccgctgtatagcaaaatttgatcatcattgcccatgggtgggtaactgtgtaggtgcaggcaaccatagatattttatgggctacctattcttcttgctttttatgatctgctggatgatttatggttgtatatcttactggggactccactgtgagaccacttacaccaaggatggattttggacatacattactcagattgccacgtgttcaccttggatgttttggatgttcctgaacagtgttttccacttcatgtgggtggctgtattactcatgtgtcagatgtaccagatatcatgtttaggtattactacaaatgaaagaatgaatgccaggagatacaagcactttaaagtcacaacaacgtctattgaaagcccattcaaccatggatgtgtaagaaatattatagacttctttgaatttcgatgctgtggcctctttcgtcctgttatcgtggactggaccaggcagtatacaatagaatatgaccaaatatcaggatctgggtaccagctggtgtagcgacatcttatcctatgaagcatattgctgagtggtgcctgaaaattgtgtctgtccgtgtctttctcacactcgaatccacatcctttgaacaagagcatgctatgtgtagggctaatggtgaattttacagtctttttttcaacacttttattaacaaaagtaaacatggacagaacacactgccatttctgggaagagtaaagatgataaaaaataattttaatggttcttaatgtggaaattcacaacatactcaacttttgggttttgttctcacagtatttttcacaaaaaaagggtaaacttattctattgacagacatggtgtactgatcagaaatgttcagttttaactaaaactaaatttatgttatttggctaaatgttatgatgcagtctagtacgagtattgcatctaattccaggagcattgttttaagttgattgactagttattatgtacatttcagaatgtacacataaatactgtgatgaaaatcatgtgattgggatctactgtgatgttgtcttcaaaggcaggagaaaataatgttcacaataaaatgtgctaacaatgttttgtttctatcagctgttgcaatgctgatatatttctagttcagtgaaataatttgtagtaaccttactctgaggttttacggtctgataatgaagcacttgcatgagtatagtaagtcatgtttttttgttcaaatttaaaagccctgctaattgcatgacacaccacatagaatgtatactagcagatactatccagtgaagcataaattagaatttaatttgatgttcaaaaacagttccatttttaagggttaaggtggtattttcaagaaaaggcagaacaaataatgcaaaattctcagtaatagtgatacatggatatacttccttttaaattctcagctgcaaaataattgtagacaaaataatggcatttaactaaagatggagcatgatctgtgtacatagcacatgtgaataaaagaaaagctgacagtatattctggtttcaataaaatgacctatcagaaagtagaatttc

SEQ ID NO: 22 - protein, 622 aa, Homo sapiens
MADGPDEYDTEAGCVPLLHPEEIKPQSHYNHGYGEPLGRKTHIDDYSTWDIVKATQYGIYERCRELVEAGYDVRQPDKENVTLLHWAAINNRIDLVKYYISKGAIVDQLGGDLNSTPLHWATRQGHLSMVVQLMKYGADPSLIDGEGCSCIHLAAQFGHTSIVAYLIAKGQDVDMMDQNGMTPLMWAAYRTHSVDPTRLLLTFNVSVNLGDKYHKNTALHWAVLAGNTTVISLLLEAGANVDAQNIKGESALDLAKQRKNVWMINHLQEARQAKGYDNPSFLRKLKADKEFRQKVMLGTPFLVIWLVGFIADLNIDSWLIKGLMYGGVWATVQFLSKSFFDHSMHSALPLGIYLATKFWMYVTWFFWFWNDLNFLFIHLPFLANSVALFYNFGKSWKSDPGIIKATEEQKKKTIVELAETGSLDLSIFCSTCLIRKPVRSKHCGVCNRCIAKFDHHCPWVGNCVGAGNHRYFMGYLFFLLFMICWMIYGCISYWGLHCETTYTKDGFWTYITQIATCSPWMFWMFLNSVFHFMWVAVLLMCQMYQISCLGITTNERMNARRYKHFKVTTTSIESPFNHGCVRNIIDFFEFRCCGLFRPVIVDWTRQYTIEYDQISGSGYQLV

SEQ ID NO: 23 - DNA, 507 bp, Homo sapiens
  CDS (50)..(454)
cttctgacagctggtgcgcctgcccgggaacatcctcctggactcaatcatggcttgtggtctggtcgccagcaacctgaatctcaaacctggagagtgccttcgagtgcgaggcgaggtggctcctgacgctaagagcttcgtgctgaacctgggcaaagacagcaacaacctgtgcctgcacttcaaccctcgcttcaacgcccacggcgacgccaacaccatcgtgtgcaacagcaaggacggcggggcctgggggaccgagcagcgggaggctgtctttcccttccagcctggaagtgttgcagaggtgtgcatcaccttcgaccaggccaacctgaccgtcaagctgccagatggatacgaattcaagttccccaaccgcctcaacctggaggccatcaactacatggcagctgacggtgacttcaagatcaaatgtgtggcctttgactgaaatcagccagcccatggcccccaataaaggcagctgcctctgctcccctg

SEQ ID NO: 24 - protein, 135 aa, Homo sapiens
MACGLVASNLNLKPGECLRVRGEVAPDAKSFVLNLGKDSNNLCLHFNPRFNAHGDANTIVCNSKDGGAWGTEQREAVFPFQPGSVAEVCITFDQANLTVKLPDGYEFKFPNRLNLEAINYMAADGDFKIKCVAFD

SEQ ID NO: 25 - DNA, 1864 bp, Homo sapiens
  CDS (153)..(815)
ctgagaagagcgtctcgcccgggagcggcggcggccatcgagacccacccaaggcgcgtccccctcggcctcccagcgctcccaagccgcagcggccgcgccccttcagctagctcgctcgctcgctctgcttccctgctgccggctgcgccatggcgttggcgttggcggcgctggcggcggtcgagccggcctgcggcagccggtaccagcagttgcagaatgaagaagagtctggagaacctgaacaggctgcaggtgatgctcctccaccttacagcagcatttctgcagagagcgcagcatattttgactacaaggatgagtctgggtttccaaagcccccatcttacaatgtagctacaacactgcccagttatgatgaagcggagaggaccaaggctgaagctactatccctttggttcctgggagagatgaggattttgtgggtcgggatgattttgatgatgctgaccagctgaggataggaaatgatgggattttcatgttaacttttttcatggcattcctctttaactggattgggtttttcctgtctttttgcctgaccacttcagctgcaggaaggtatggggccatttcaggatttggtctctctctaattaaatggatcctgattgtcaggttttccacctatttccctggatattttgatggtcagtactggctctggtgggtgttccttgttttaggctttctcctgtttctcagaggatttatcaattatgcaaaagttcggaagatgccagaaactttctcaaatctccccaggaccagagttctctttatttattaaagatgttttctggcaaaggccttcctgcatttatgaattctctctcaagaagcaagagaacacctgcaggaagtgaatcaagatgcagaacacagaggaataatcacctgctttaaaaaaataaagtactgttgaaaagatcatttctctctatttgttcctaggtgtaaaattttaatagttaatgcagaattctgtaatcattgaatcattagtggttaatgtttgaaaaagctcttgcaatcaagtctgtgatgtattaataatgccttatatattgtttgtagtcattttaagtagcatgagccatgtccctgtagtcggtagggggcagtcttgctttattcatcctccatctcaaaatgaacttggaattaaatattgtaagatatgtataatgctggccattttaaaggggttttctcaaaagttaaacttttgctatgactgtgtttttgcacataatccatatttgctgttcaagttaatctagaaatttattcaattctgtatgaacacctggaagcaaaatcatagtgcaaaaatacatttaaggtgtggtcaaaaataagtctttaattggtaaataataagcattaattttttatagcctgtattcacaattctgcggtaccttattgtacctaagggattctaaaggtgttgtcactgtataaaacagaaagcactaggatacaaatgaagcttaattactaaaatgtaattcttgacactctttctataattagcgttcttcacccccacccccacccccaccccccttattttccttttgtctcctggtgattaggccaaagtctgggagtaaggagaggattaggtacttaggagcaaagaaagaagtagcttggaacttttgagatgatccctaacatactgtactacttgcttttacaatgtgttagcagaaaccagtgggttataatgtagaatgatgtgctttctgcccaagtggtaattcatcttggtttgctatgttaaaactgtaaatacaacagaacattaataaatatctcttgtgtagc

SEQ ID NO: 26 - protein, 221 aa, Homo sapiens
MALALAALAAVEPACGSRYQQLQNEEESGEPEQAAGDAPPPYSSISAESAAYFDYKDESGFPKPPSYNVATTLPSYDEAERTKAEATIPLVPGRDEDFVGRDDFDDADQLRIGNDGIFMLTFFMAFLFNWIGFFLSFCLTTSAAGRYGAISGFGLSLIKWILIVRFSTYFPGYFDGQYWLWWVFLVLGFLLFLRGFINYAKVRKMPETFSNLPRTRVLFIY

SEQ ID NO: 27 - DNA, 1617 bp, Homo sapiens
  CDS (285)..(836)
tttttacaaaggccccgggcgcgagaggacgtgctctgccagccagtgggaaggcaggccgcgcgcgcgggagcgcgggaggatcggcggctcgcggtcactggtccctggctcggttccccgcaccccggggctcacacttacccgcgcggaggagcagcggccgggtgtccacccccatcctgcgcccagtctcctcgattcccctcgctctgagccgggagagccgaacagctgaagagagttcactgactccccagccccaggtgggccttgtgcacatcatgaccagttttgaagatgctgacacagaagagacagtaacttgtctccagatgacggtttaccatcctggccagttgcagtgtggaatatttcagtcaataagttttaacagagagaaactcccttccagcgaagtggtgaaatttggccgaaattccaacatctgtcattatacttttcaggacaaacaggtttcccgagttcagttttctctgcagctgtttaaaaaattcaacagctcagttctctcctttgaaataaaaaatatgagtaaaaagaccaatctgatcgtggacagcagagagctgggctacctaaataaaatggacctgccatacaggtgcatggtcagattcggagagtatcagtttctgatggagaaggaagatggcgagtcattggaattttttgagactcaatttattttatctccaagatcactcttgcaagaaaacaactggccaccacacaggcccataccggagtatggcacttattcgctctgctcctcccaaagcagttctccgacagaaatggatgaaaatgagtcatgaacacagaaagtctaagaggagaaatatgatggatgaagagctctgtagatgctgtatagacactaaataagagttgattagggtagtatattatagtcatctgttatgctgtgaaatttggaattcagtattatcattttgaagtctgtaaattgtgttagtcattaacttagtcacctgttgtattctggatctacacaaaattattttaactgctcttattaatctgtgaggattaatatacaaaaagtatcctttgagatgaagtcgtgttctcaaaataaggttatattattttctttttctgcttgattttcatcttgtgttttgctttgtttttgtaaggaaccatctcttggtttggtcacatcagttcacaacagccatttgttttcaaggtcaaggctccaggcaggttgttactggtgtttgcagcctgtcagtacttgcagtactggaataggttctaggctagtgtctgcgcgtcactgtggttttagcatgggaggacttatttgagaaatactaccttacttttctatgatttctttttacagagttatagtgtgtttactcctaagatgacagttctctttgtctatattcagcatctaagacaaatatttaaacattttaaagaaccactgtgttaagtttaggattatttacttaccaaattagaagtttgacttttatgtgttatacacaatcttaaaatttcacgaattcacctttttaatagtatccatgtacataataaaatcaaagtttaattagc

SEQ ID NO: 28 - protein, 184 aa, Homo sapiens
MTSFEDADTEETVTCLQMTVYHPGQLQCGIFQSISFNREKLPSSEVVKFGRNSNICHYTFQDKQVSRVQFSLQLFKKFNSSVLSFEIKNMSKKTNLIVDSRELGYLNKMDLPYRCMVRFGEYQFLMEKEDGESLEFFETQFILSPRSLLQENNWPPHRPIPEYGTYSLCSSQSSSPTEMDENES

SEQ ID NO: 29 - DNA, 1898 bp, Homo sapiens
  CDS (119)..(1294)
acttccgctggccgctggctcgctggccgctcctggaggcggcggcgggagcgcagggggcgcgcggcccggggactcgcattccccggttccccctccaccccacgcggcctggaccatggacgccagatggtgggcagtggtggtgctggctgcgttcccctccctaggggcaggtggggagactcccgaagcccctccggagtcatggacccagctatggttcttccgatttgtggtgaatgctgctggctatgccagctttatggtacctggctacctcctggtgcagtacttcaggcggaagaactacctggagaccggtaggggcctctgctttcccctggtgaaagcttgtgtgtttggcaatgagcccaaggcctctgatgaggttcccctggcgccccgaacagaggcggcagagaccaccccgatgtggcaggccctgaagctgctcttctgtgccacagggctccaggtgtcttatctgacttggggtgtgctgcaggaaagagtgatgacccgcagctatggggccacagccacatcaccgggtgagcgctttacggactcgcagttcctggtgctaatgaaccgagtgctggcactgattgtggctggcctctcctgtgttctctgcaagcagccccggcatggggcacccatgtaccggtactcctttgccagcctgtccaatgtgcttagcagctggtgccaatacgaagctcttaagttcgtcagcttccccacccaggtgctggccaaggcctctaaggtgatccctgtcatgctgatgggaaagcttgtgtctcggcgcagctacgaacactgggagtacctgacagccaccctcatctccattggggtcagcatgtttctgctatccagcggaccagagccccgcagctccccagccaccacactctcaggcctcttcacagtgggctcactgctagaacagggggccctactggagggaacccgcttcatggggcgacacagtgagtttgctgcccatgccctgctactctccatctgctccgcatgtggccagctcttcatcttttacaccattgggcagtttggggctgccgtcttcaccatcatcatgaccctccgccaggcctttgccatccttctttcctgccttctctatggccacactgtcactgtggtgggagggctgggggtggctgtggtctttgctgccctcctgctcagagtctacgcgcggggccgtctaaagcaacggggaaagaaggctgtgcctgttgagtctcctgtgcagaaggtttgagggtggaaagggcctgaggggtgaagtgaaataggaccctcccaccatccccttctgctgtaacctctgagggagctggctgaaagggcaaaatgcaggtgttttctcagtatcacagaccagctctgcagcaggggattggggagcccaggaggcagccttcccttttgccttaagtcacccatcttccagtaagcagtttattctgagccccgggggtagacagtcctcagtgaggggttttggggagtttggggtcaagagagcataggtaggttccacagttactcttcccacaagttcccttaagtcttgccctagctgtgctctgccaccttccagactcactcccctctgcaaatacctgcatttcttaccctggtgagaaaagcacaagcggtgtaggctccaatgctgctttcccaggagggtgaagatggtgctgtgctgaggaaaggggatgcagagccctgcccagcaccaccacctcctatgctcctggatccctaggctctgttccatgagcctgttgcaggttttggtactttagaaatgtaactttttgctcttataattttattttattaaattaaattactgc

SEQ ID NO: 30 - protein, 392 aa, Homo sapiens
MDARWWAVVVLAAFPSLGAGGETPEAPPESWTQLWFFRFVVNAAGYASFMVPGYLLVQYFRRKNYLETGRGLCFPLVKACVFGNEPKASDEVPLAPRTEAAETTPMWQALKLLFCATGLQVSYLTWGVLQERVMTRSYGATATSPGERFTDSQFLVLMNRVLALIVAGLSCVLCKQPRHGAPMYRYSFASLSNVLSSWCQYEALKFVSFPTQVLAKASKVIPVMLMGKLVSRRSYEHWEYLTATLISIGVSMFLLSSGPEPRSSPATTLSGLFTVGSLLEQGALLEGTRFMGRHSEFAAHALLLSICSACGQLFIFYTIGQFGAAVFTIIMTLRQAFAILLSCLLYGHTVTVVGGLGVAVVFAALLLRVYARGRLKQRGKKAVPVESPVQKV

SEQ ID NO: 31 - DNA, 1519 bp, Homo sapiens
  CDS (11)..(1084)
attagtgctaatgatgcaacgagttttcagaggaaaacttctgagtaatgatgaagtaacaataaagtataaagatgaagatggagatcttataacaatttttgatagttctgacctttcctttgcaattcagtgcagtaggatactgaaactgacattatttgttaatggccagccaagaccccttgaatcaagtcaggtgaaatatctccgtcgagaactgatagaacttcgaaataaagtgaatcgtttattggatagcttggaaccacctggagaaccaggaccttccaccaatattcctgaaaatgatactgtggatggtagggaagaaaagtctgcttctgattcttctggaaaacagtctactcaggttatggcagcaagtatgtctgcttttgatcctttaaaaaaccaagatgaaatcaataaaaatgttatgtcagcgtttggcttaacagatgatcaggtttcagggccacccagtgctcctgcagaagatcgttcaggaacacccgacagcattgcttcctcctcctcagcagctcacccaccaggcgttcagccacagcagccaccatatacaggagctcagactcaagcaggtcagatgtaccaacagtaccagcaacaggccggctatggtgcacagcagccgcaggctccacctcagcagcctcaacagtatggtattcagtattcagcaagctatagtcagcagactggaccccaacaacctcagcagttccagggatatggccagcaaccaacttcccaggcaccagctcctgccttttctggtcagcctcaacaactgcctgctcagccgccacagcagtaccaggcgagcaattatcctgcacaaacttacactgcccaaacttctcagcctactaattatactgtggctcctgcctctcaacctggaatggctccaagccaacctggggcctatcaaccaagaccaggttttacttcacttcctggaagtaccatgacccctcctccaagtgggcctaatccttatgcgcgtaaccgtcctccctttggtcagggctatacccaacctggacctggttatcgataaggaggctcctctacaccaattaatgtagctgctagctattggcctcccaaaagactccagtactattttaatttgtattgaagaagttcagaaatttaaaagcagagcattttttatgatatcattgttggtgttaattgaaagtataatttgctggaacacaaagaccaaaatgaaagttttttcctccctgcttaaaaatgtagcagcttcttagttactttggaacactactcttacatgtataaagtgattgacttgactttctagcttcccttgtccggaggatattaaaatgctagggtgaggtttagccatcttacttggctttttactattaacatgatgtactaaagtagagccctttgagaatacaagatattatgtataaaatgtaacactgatgataggttaataaagatgattgaatcc

SEQ ID NO: 32 - protein, 358 aa, Homo sapiens
MMQRVFRGKLLSNDEVTIKYKDEDGDLITIFDSSDLSFAIQCSRILKLTLFVNGQPRPLESSQVKYLRRELIELRNKVNRLLDSLEPPGEPGPSTNIPENDTVDGREEKSASDSSGKQSTQVMAASMSAFDPLKNQDEINKNVMSAFGLTDDQVSGPPSAPAEDRSGTPDSIASSSSAAHPPGVQPQQPPYTGAQTQAGQMYQQYQQQAGYGAQQPQAPPQQPQQYGIQYSASYSQQTGPQQPQQFQGYGQQPTSQAPAPAFSGQPQQLPAQPPQQYQASNYPAQTYTAQTSQPTNYTVAPASQPGMAPSQPGAYQPRPGFTSLPGSTMTPPPSGPNPYARNRPPFGQGYTQPGPGYR

SEQ ID NO: 33 - DNA, 1641 bp, Homo sapiens
  CDS (19)..(1206)
aacatcctggagtccaccatgaacggacagttggatctaagtgggaagctaatcgtcaaagctcaacttggggaggatattcggcgaattcctattcataatgaagatattacttatgatgaattagtgctaatgatgcaacgagttttcagaggaaaacttctgagtaatgatgaagtaacaataaagtataaagatgaagatggagatcttataacaatttttgatagttctgacctttcctttgcaattcagtgcagtaggatactgaaactgacattatttgttaatggccagccaagaccccttgaatcaagtcaggtgaaatatctccgtcgagaactgatagaacttcgaaataaagtgaatcgtttattggatagcttggaaccacctggagaaccaggaccttccaccaatattcctgaaaatgatactgtggatggtagggaagaaaagtctgcttctgattcttctggaaaacagtctactcaggttatggcagcaagtatgtctgcttttgatcctttaaaaaaccaagatgaaatcaataaaaatgttatgtcagcgtttggcttaacagatgatcaggtttcagggccacccagtgctcctgcagaagatcgttcaggaacacccgacagcattgcttcctcctcctcagcagctcacccaccaggcgttcagccacagcagccaccatatacaggagctcagactcaagcaggtcagatgtaccaacagtaccagcaacaggccggctatggtgcacagcagccgcaggctccacctcagcagcctcaacagtatggtattcagtattcagcaagctatagtcagcagactggaccccaacaacctcagcagttccagggatatggccagcaaccaacttcccaggcaccagctcctgccttttctggtcagcctcaacaactgcctgctcagccgccacagcagtaccaggcgagcaattatcctgcacaaacttacactgcccaaacttctcagcctactaattatactgtggctcctgcctctcaacctggaatggctccaagccaacctggggcctatcaaccaagaccaggttttacttcacttcctggaagtaccatgacccctcctccaagtgggcctaatccttatgcgcgtaaccgtcctccctttggtcagggctatacccaacctggacctggttatcgataaggaggctcctctacaccaattaatgtagctgctagctattggcctcccaaaagactccagtactattttaatttgtattgaagaagttcagaaatttaaaagcagagcattttttatgatatcattgttggtgttaattgaaagtataatttgctggaacacaaagaccaaaatgaaagttttttcctccctgcttaaaaatgtagcagcttcttagttactttggaacactactcttacatgtataaagtgattgacttgactttctagcttcccttgtccggaggatattaaaatgctagggtgaggtttagccatcttacttggctttttactattaacatgatgtactaaagtagagccctttgagaatacaagatattatgtataaaatgtaacactgatgataggttaataaagatgattgaatcc

SEQ ID NO: 34 - protein, 396 aa, Homo sapiens [sequence omitted]

SEQ ID NO: 35 - DNA, 1545 bp, Homo sapiens
  CDS (24)..(422)
aaaagcggcgagtaagatggaagatgaggaggtcgctgagagctgggaagaggcggcagacagcgggcaggaaatccaaatctcctcccaaagtgcccattgtgattcaggacgatagccttcccgcggggccccctccacagatccgcatcctcaagaggcccaccagcaacggtgtggtcagcagccccaactccaccagcaggcccacccttccagtcaagtccctagcacagcgagaggccgagtacgccgaggcccggaagcggatcctgggcagcgccagccccgaggaggagcaggagaaacccatcctcgacaggccaaccaggatctcccaacccgaagacagcaggcagcccaataatgtgatcagacagcctttgggtcctgatgggtctcaaggcttcaaacagcgcagataaatgcaggcaagaaaagatgccgccgttgctgccgtcaccgcctcctgggtcgtccgccacgggttgcactgccgtggcagacagctggacttgagcagagggaacgacctgacttacttgcactgtgatcccccttgctccgcccactgtgaccttgaaccccatgcactgtgacctccccccttctcccccttcccactgtgattggcacatcgacaagggctgtcccaagtcaatggaaagggaaagggtgggggttaggggaaggttggggggacccagcaaggactcagagagtcagacagtgccacttggccacttggggtaaagccagtgccagcaataacagtttatcatgctcattaatttgggatttcaaaacacaaatgaaaactcacacccacccacccccaagtgcatgtctccatcacttaaaaagtaagttccatttgaaaatatcctttcttttttttttctttttcttcctatttttgtttgtttatacaaatatctgatttgcaagaaaaagtgcatgggaggggttttagtggtttaatgaatttttaattaagaaagggtagtttggtagtctacttaaaaatgtttctgggaaattcactagaaacattaaccaataggattttggtgagcttagcttctgtattcctactgccgcccagaaaaggggcagggctctgcagccgccaggacagacgagcaccccatgcctatacctccctccccgagctaagtcccagggcatctgggccttgcctggagactgggctagctctgtaggctcggagagcctggggagggtgccaaccccacctctagtattttgggagatagggaaagtgaaccgacttccccttcccatacccctcagggtggttccctaccagccaggcttactacttctagaagaaagcagagtgccagggagtgagattgcatccctgggcttagaagtgacggagagaagacttgtttagtattttgccatcagcacaaggaaaaccaggagagagtctgcctccagtaactatacctggtacatttcctgtgtgcaatcagtaccttgaaggcagaacattctgaataaagttggaaaaagaac

SEQ ID NO: 36 - protein, 133 aa, Homo sapiens
MRRSLRAGKRRQTAGRKSKSPPKVPIVIQDDSLPAGPPPQIRILKRPTSNGVVSSPNSTSRPTLPVKSLAQREAEYAEARKRILGSASPEEEQEKPILDRPTRISQPEDSRQPNNVIRQPLGPDGSQGFKQRR

SEQ ID NO: 37 - DNA, 1545 bp, Homo sapiens; identical to SEQ ID NO: 35
  CDS (17)..(115)

SEQ ID NO: 38 - protein, 33 aa, Homo sapiens
MEDEEVAESWEEAADSGQEIQISSQSAHCDSGR

SEQ ID NO: 39 - DNA, 868 bp, Homo sapiens
  CDS (18)..(413)
ggcgagtaagatggaagatgaggaggtcgctgagagctgggaagaggcggcagacagcggggaaatccaaatctcctcccaaagtgcccattgtgattcaggacgatagccttcccgcggggccccctccacagatccgcatcctcaagaggcccaccagcaacggtgtggtcagcagccccaactccaccagcaggcccacccttccagtcaagtccctagcacagcgagaggccgagtacgccgaggcccggaagcggatcctgggcagcgccagccccgaggaggagcaggagaaacccatcctcgacaggccaaccaggatctcccaacccgaagacagcaggcagcccaataatgtgatcagacagcctttgggtcctgatgggtctcaaggcttcaaacagcgcagataaatgcaggcaagaaaagatgccgccgttgctgccgtcaccgcctcctgggtcgtccgccacgggttgcactgccgtggcagacagctggacttgagcagagggaacgacctgacttacttgcactgtgatcccccttgctccgcccactgtgaccttgaaccccatgcactgtgacctccccccttctcccccttcccactgtgattggcacatcgacaagggctgtcccaagtcaatggaaagggaaagggtgggggttaggggaaggttggggggacccagcaaggactcagagagtcagacagtgccacttggccacttggggtaaagccagtgccagcaataacagtttatcatgctcattaatttgggatttcaaaacacaaatgaaaactcacacccacccacccccaagtgcatgtctccatcacttaaaaagtaagttccatttg

SEQ ID NO: 40 - protein, 132 aa, Homo sapiens
MRRSLRAGKRRQTAGKSKSPPKVPIVIQDDSLPAGPPPQIRILKRPTSNGVVSSPNSTSRPTLPVKSLAQREAEYAEARKRILGSASPEEEQEKPILDRPTRISQPEDSRQPNNVIRQPLGPDGSQGFKQRR

SEQ ID NO: 41 - DNA, 868 bp, Homo sapiens; identical to SEQ ID NO: 39
  CDS (11)..(106)

SEQ ID NO: 42 - protein, 32 aa, Homo sapiens
MEDEEVAESWEEAADSGEIQISSQSAHCDSGR

SEQ ID NO: 43 - DNA, 1701 bp, Homo sapiens
  CDS (17)..(472)
aaaagcggcgagtaagatggaagatgaggaggtcgctgagagctgggaagaggcggcagacagcggggaaatagacagacggttggaaaaaaaactgaagatcacacaaaaagagagcaggaaatccaaatctcctcccaaagtgcccattgtgattcaggacgatagccttcccgcggggccccctccacagatccgcatcctcaagaggcccaccagcaacggtgtggtcagcagccccaactccaccagcaggcccacccttccagtcaagtccctagcacagcgagaggccgagtacgccgaggcccggaagcggatcctgggcagcgccagccccgaggaggagcaggagaaacccatcctcgacaggccaaccaggatctcccaacccgaagacagcaggcagcccaataatgtgatcagacagcctttgggtcctgatgggtctcaaggcttcaaacagcgcagataaatgcaggcaagaaaagatgccgccgttgctgccgtcaccgcctcctgggtcgtccgccacgggttgcactgccgtggcagacagctggacttgagcagagggaacgacctgacttacttgcactgtgatcccccttgctccgcccactgtgaccttgaaccccatgcactgtgacctccccccttctcccccttcccactgtgattggcacatcgacaagggctgtcccaagtcaatggaaagggaaagggtgggggttaggggaaggttggggggacccagcaaggactcagagagtcagacagtgccacttggccacttggggtaaagccagtgccagcaataacagtttatcatgctcattaatttgggatttcaaaacacaaatgaaaactcacacccacccacccccaagtgcatgtctccatcacttaaaaagtaagttccatttgaaaatatcctttcttttttttttcttcctatttttgtttgtttatacaaatatctgatttgcaagaaaaagtgcatgggaggggttttagtggtttaatgaatttttaattaagaaagggtagtttggtagtctacttaaaaatgtttctgggaaattcactagaaacattaaccaataggattttggtgagcttagcttctgtattcctactgccgcccagaaaaggggcagggctctgcagccgccaggacagacgagcaccccatgcctatacctccctccccgagctaagtcccagggcatctgggccttgcctggagactgggctagctctgtaggctcggagagcctggggagggtgccaaccccacctctagtattttgggagatagggaaagtgaaccgacttccccttcccatacccctcagggtggttccctaccagccaggcttactacttctagaagaaagcagagtgccagggagtgagattgcatccctgggcttagaagtgacggagagaagacttgtttagtattttgccatcagcacaaggaaaaccaggagagagtctgcctccaggactctgagccttctgcctcgtatgttcagaaggtggataggtcttcccactccagcatggcttgaactcttaggggtctgcagtgctccatctccattggtggccccagctcagtaactatacctggtacatttcctgtgtgcaatcagtaccttgaaggcagaacattctgaataaagttggaaaaag

SEQ ID NO: 44 - protein, 152 aa, Homo sapiens
MEDEEVAESWEEAADSGEIDRRLEKKLKITQKESRKSKSPPKVPIVIQDDSLPAGPPPQIRILKRPTSNGVVSSPNSTSRPTLPVKSLAQREAEYAEARKRILGSASPEEEQEKPILDRPTRISQPEDSRQPNNVIRQPLGPDGSQGFKQRR

SEQ ID NO: 45 - DNA, 1538 bp, Homo sapiens
  CDS (194)..(829)
cttcccggctccagctccgccgccagctccagcctttgctccccctcccaaagtcccctccccggagcggagcgcacctagggtccctcttccgtccccccagcccagctacccgttcagaccagcagcctcggggggcacccccccgccagcctgcctccctcccgctcagccctgccagggttccccagccatgaatctcttccgattcctgggagacctctcccacctcctcgccatcatcttgctactgctcaaaatctggaagtcccgctcgtgcgccggaatttcagggaagagccaggtcctgtttgctgtggtgttcactgcccgatatctggacctcttcaccaactacatctcactctacaacacgtgtatgaaggtggtctacatagcctgctccttcaccacggtctggttgatttatagcaagttcaaagctacttacgatgggaaccatgacacgttcagagtggagttcctggtcgttcccacagccattctggcgttcctggtcaatcatgacttcacccctctggagatcctctggaccttctccatctacctggagtcagtggccatcttgccgcagctgttcatggtgagcaagaccggcgaggcggagaccatcaccagccactacttgtttgcgctaggcgtttaccgcacgctctatctcttcaactggatctggcgctaccatttcgagggcttcttcgacctcatcgccattgtggcaggcctggtccagacagtcctctactgcgatttcttctacctctatatcaccaaagtcctaaaggggaagaagttgagtttgccggcatagccccggtcctctccatctctctcctcggcagcagcgggaggcagaggaaggcggcagaagatgaagagctttcccatccaggggtgacttttttaagaacccacctcttgtgctccccatcccgcctcctgccgggtttcagggggacagtggaggatccaggtcttggggagctcaggacttgggctgtttgtagttttttgccttttagacaagaaaaaaaaatctttccactctttagtttttgattctgatgactcgtttttcttctactctgtggccccaatttttataaagtgtttttgagtgtcctatgggccggggcagggtccaagatcttttcccttccccaggcccctcggctccctcccagatcccacccccagccccactggttgccaaacactaaatctgccgacacccatctgccccacctcctgccatggccatgaaccgcgacccccactaaatttctagattggggatagggagaaagggaggcccaggaaggtctcccctgattttttttcatagtaatttttttccccagagtttgaattttttggtcttctcctggttttttggcaaattaggggggcccggggctcaagtgcgggaagggggctggcccgaggatcccatggctctcacaccatgtttttgtacagaactgatggttgaatctttgttctcttgaaataaacag

SEQ ID NO: 46 - protein, 212 aa, Homo sapiens
MNLFRFLGDLSHLLAIILLLLKIWKSRSCAGISGKSQVLFAVVFTARYLDLFTNYISLYNTCMKVVYIACSFTTVWLIYSKFKATYDGNHDTFRVEFLVVPTAILAFLVNHDFTPLEILWTFSIYLESVAILPQLFMVSKTGEAETITSHYLFALGVYRTLYLFNWIWRYHFEGFFDLIAIVAGLVQTVLYCDFFYLYITKVLKGKKLSLPA

SEQ ID NO: 47 - DNA, 1782 bp, Homo sapiens
  CDS (159)..(1004)
atttttgctggagcctgcgaccgagtgggagtggagtggagcgactgtggttgccgactctttcctcttccccacggtccagtcagcgggttaattaggccatcggccctcgagccgagacttgtctcttatctagttctggggagcgcctcgtcaacatgagtgatgtggaggaaaacaacttcgagggcagagagtctcgctctcagtcaaaatctccaacgggaactcctgctcgtgtaaaatcggagagcaggtcaggatctcgtagtccatcaagggtttccaaacactctgaatcccattctcgatcaagatcaaaatccaggtcgaggtcaaggagacattctcatagacgttacactcgatccagatcccactctcactctcataggagacgatctcgaagtagatcatatacaccagaataccggcggcgaaggagccgaagccattctccaatgtctaaccggagaagacatactggcagcagggcaaatccagatcccaacacttgccttggagtgtttggcctcagtttgtacacaacagagagggatcttcgtgaagtattttctcgatatggaccattgagtggtgtcaatgtggtttatgatcagcgaactgggcgatctcgaggatttgcttttgtgtattttgagagaatagatgactcaaaggaggctatggaaagggcaaatggaatggagctggatggtagaagaattcgggtggattattctataaccaagagagcgcacacaccaacaccaggcatctacatgggcagaccaactcatagtggtgggggtggtggaggaggcggcggcggtggaggtggaggtggtggcagacgtcgagattcttactatgatagaggatatgatcgtgggtatgacagatatgaagactatgattaccgatacagaagacgatcaccttctccttattatagtcgatatagatcacgatcaagatctcgttcctacagcccaagacgctattgataacggaatggttgcaattaaggacattttttttcctctttttttttttttttttttttaattctgagatttccccaagctgtggattgttcctactccttaagaaaaaaactttggtttatttagcatctacacttttgtcagttgtgttgctgttttccacccattttattatactcttaaaagatgtaattgttgtcattttgaacagttaaacatcttgagtataaaaagaaccccaatgttatgttatgctttgtaaattttttttttgcttttacctagataaacttctagctaatcaaataaggaaagaaactgtctttttaaagcttcttttgtgttagatactgtattagagatctgcatttatcatgagttcctttttttttttaactttatttttgggaaagtaacacatgaagtagttcagtcatgtcaggtttgtctggggtggaatggaacagtcaggtagttgaaagtttttttttagagatgaaaagcttgtgaactcctgtaaaacatgctgtatttgaaatacatctgttaaaacttaaaaactaaagtgtgattttttttgttgttgttaagtttattgaagtttattcccttaatcagtgaaggacaacccttatttattacctagagcagttgtataattcgctgttagaaattttggtattgggacagtggataagcaggttatcacatagcatagaattcttaaaagatacatgtggggaaaagtagtctcaaataaaagctaatttctttg

SEQ ID NO: 48 - protein, 282 aa, Homo sapiens
MSDVEENNFEGRESRSQSKSPTGTPARVKSESRSGSRSPSRVSKHSESHSRSRSKSRSRSRRHSHRRYTRSRSHSHSHRRRSRSRSYTPEYRRRRSRSHSPMSNRRRHTGSRANPDPNTCLGVFGLSLYTTERDLREVFSRYGPLSGVNVVYDQRTGRSRGFAFVYFERIDDSKEAMERANGMELDGRRIRVDYSITKRAHTPTPGIYMGRPTHSGGGGGGGGGGGGGGGGRRRDSYYDRGYDRGYDRYEDYDYRYRRRSPSPYYSRYRSRSRSRSYSPRRY

SEQ ID NO: 49 - DNA, 2323 bp, Homo sapiens
  CDS (181)..(1302)
aattccctccgccgcggtcgctgagcgagtgcggcgggaatgcggaaccggcgcgcgggctgaggccgcccgggatggcgcaggggcggcggcggcgggcggcctgcgcggggccctagcgagccgggctgacgctcccggccccggccccggcatcggcatcgcgggcgcatcgcggccatggccaaggagcggcgcagggcggtcctggagctgctgcagcggccggggaacgcgcgctgcgcggactgcggcgccccggatcccgactgggcctcctacactctgggcgtcttcatctgcctgagctgctcgggaatccaccggaatatcccccaggtcagcaaggtgaagtccgtccgcctggacgcctgggaggaggcccaagtggagttcatggcctcccacgggaacgacgccgcgagagccaggtttgagtccaaagtaccctccttctactaccggcccacgccctccgactgccagctccttcgagagcagtggatccgggccaagtacgagcgacaggagttcatctacccggagaagcaggagccctactcggcagggtaccgtgagggttttctctggaagcgtggccgggacaacgggcagtttttgagccggaagtttgtgctgacagaacgagagggtgctctgaagtatttcaacagaaatgatgccaaggagcccaaggccgtgatgaagatcgagcacctgaatgccaccttccagccggccaagatcggccacccccacggcctgcaggtcacctacctgaaggacaacagcacccgtaacatcttcatctaccatgaggacgggaaggagattgtggactggttcaatgcactccgagctgctcgcttccactacctgcaggtggcattcccaggggccagcgacgcagatctggtgccaaagctctccaggaactacctgaaggaaggctacatggagaagacggggcccaagcaaacggaaggcttccggaagcgctggttcaccatggatgaccgcaggctcatgtacttcaaagaccccctggacgccttcgcccgaggggaagtcttcattggcagcaaggagagtggctacacggtgctgcatgggttcccgccgtccacccagggccaccactggccacatggcatcaccatcgtcacgcccgaccgcaagtttctgtttgcctgcgagacggagtccgaccagagggagtgggtggcggccttccagaaggcggtggacaggcccatgctgccccaggagtacgcagtggaggcgcacttcaagcataaaccttagcgagtgcggctggaggaccacggacattggactcactgtggctggacggaggggacccgtggatgggggggctctggcgtcctgaggccacctggccccacctgctcctcagggcagcccggcgcggccaggtagggcccgagcttcagcttccaggatgcttctctggaacctcaaggcaggcagcccaggccctgggcctgatctctaaccccgtcatgctgctgctgaccacacccagccaacctgcccctccctgacccggggccccctttcctccagggcccagtctggctcccgagctcagacacagcccccaggagccgcccaccacggctgtgggaacttccaggcctcagcgcagagccctgcttggggccagcacggtgggcagctgccggccgctggggactgggccctgctcgcatgccgccccgccctccccccacctccacgactatttattgagcgcctgttgtgtgtcacggggctatgagggccgtggggtgtttgggtggattatccacacaggtcccggcccctgcccgggctggagttgccacagcctgtgctcctggtcctcacctggaggggccagcaggctgccgtcccaccacacgtggcctctgcgcccagcacggtgctcgccgacagtggtgtctgaacccttggggacgagggcctgggccgcggtgaggccaccagaggcaggagtggccctgggggtcccgggcactgtcgcgcttgctgcaggcggcccagccgtgtatttatttttcacctatctccttcctgtcaaggcaggccgggctccagggctccccttgcgtggggcatgtaggtgggggaggcgtctgcaggtcacctggggggcccagccctctcccagccttgcctggctgagctgtgttccaggggagccctggacaagccctcataggcagggagggggtttccgaggccaggcatccgccgccccgtgtcgcatcctggaataaaatgtggctctggcatggtt

SEQ ID NO: 50 - protein, 374 aa, Homo sapiens
MAKERRRAVLELLQRPGNARCADCGAPDPDWASYTLGVFICLSCSGIHRNIPQVSKVKSVRLDAWEEAQVEFMASHGNDAARARFESKVPSFYYRPTPSDCQLLREQWIRAKYERQEFIYPEKQEPYSAGYREGFLWKRGRDNGQFLSRKFVLTEREGALKYFNRNDAKEPKAVMKIEHLNATFQPAKIGHPHGLQVTYLKDNSTRNIFIYHEDGKEIVDWFNALRAARFHYLQVAFPGASDADLVPKLSRNYLKEGYMEKTGPKQTEGFRKRWFTMDDRRLMYFKDPLDAFARGEVFIGSKESGYTVLHGFPPSTQGHHWPHGITIVTPDRKFLFACETESDQREWVAAFQKAVDRPMLPQEYAVEAHFKHKP

SEQ ID NO: 51 - DNA, 827 bp, Homo sapiens
  CDS (32)..(808)
gggcggaaggggtgggtagggccgggcgataatggcggcgtcgaggctggagctaaacctggtgcggctgctatcccgctgcgaggcgatggcagcggagaaacgggacccggacgagtggcgcctggagaagtacgtgggagccctagaggacatgttgcaggccctgaaggtccacgcgagcaaaccggcctctgaggtgatcaatgaatattcctggaaggtggattttctgaaggggatgctgcaagccgagaagctgacctcctcctcagagaaagcactggccaaccagttcctggcccctggccgtgtgccaaccacagccagagagcgagtgcccgccacaaagacggtgcatctgcagtcacgggcgcggtacaccagcgagatgcggagtgagctactaggcacggactctgcagagcctgagatggacgtaaggaagagaactggagtggcagggtcccagccagtgagtgagaagcagtcggcagctgagctagacctcgtcctgcagcgacatcagaacctccaggaaaagctggcggaagagatgctaggactggcccggagcctcaagaccaataccctggccgcccagagtgtcatcaagaaggacaaccagaccctgtcacactcactgaaaatggcggaccagaacctggagaaactgaagacggagtcagagcgtctggagcagcacacgcagaagtcagtcaactggctgctctgggccatgctcattatcgtctgcttcatcttcattagcatgatcctcttcattcgaatcatgcctaaactcaaataaagacccccgcccacct

SEQ ID NO: 52 - protein, 259 aa, Homo sapiens
MAASRLELNLVRLLSRCEAMAAEKRDPDEWRLEKYVGALEDMLQALKVHASKPASEVINEYSWKVDFLKGMLQAEKLTSSSEKALANQFLAPGRVPTTARERVPATKTVHLQSRARYTSEMRSELLGTDSAEPEMDVRKRTGVAGSQPVSEKQSAAELDLVLQRHQNLQEKLAEEMLGLARSLKTNTLAAQSVIKKDNQTLSHSLKMADQNLEKLKTESERLEQHTQKSVNWLLWAMLIIVCFIFISMILFIRIMPKLK

SEQ ID NO: 53 - DNA, 2086 bp, Homo sapiens
  CDS (91)..(654)
gcgctgtcaactctccaactcagctcagctgatcggttgccgccgccgccgccgccagattctggaggcgaagaacgcaaagctgagaacatggacgttaatatcgccccactccgcgcctgggacgatttcttcccgggttccgatcgctttgcccggccggacttcagggacatttccaaatggaacaaccgcgtagtgagcaacctgctctattaccagaccaactacctggtggtggctgccatgatgatttccattgtggggtttctgagtcccttcaacatgatcctgggaggaatcgtggtggtgctggtgttcacagggtttgtgtgggcagcccacaataaagacgtccttcgccggatgaagaagcgctaccccacgacgttcgttatggtggtcatgttggcgagctatttccttatctccatgtttggaggagtcatggtctttgtgtttggcattacttttcctttgctgttgatgtttatccatgcatcgttgagacttcggaacctcaagaacaaactggagaataaaatggaaggaataggtttgaagaggacaccgatgggcattgtcctggatgccctagaacagcaggaagaaggcatcaacagactcactgactatatcagcaaagtgaaggaataaacataacttacctgagctagggttgcagcagaaattgagttgcagcttgcccttgtccagacctattttctgcttgcgtttttgaaacaggaggtgcacgtaccacccaattatctatggcagcatgcatgtataggccgaactattatcagctctgatgtttcagagagaagacctcagaaaccgaaagaaaaccaccaccctcctattgtgtctgaagtttcacgtgtgtttatgaaatctaatgggaaatggatcacacgatttctttaagggaattaaaaaaaataaaagaattacggcttttacagcaacaatacgattatcttataggaaaaaaaaaatcattgtaaagtatcaagacaatacgagtaaatgaaaaggctgttaaagtagatgacatcatgtgttagcctgttcctaatcccctagaattgtaatgtgtgggatataaattagtttttattattctcttaaaaatcaaagatgatctctatcactttgccacctgtttgatgtgcagtggaaactggttaagccagttgttcatacttcgtttacaaatataaagatagctgtttaggatattttgttacatatttgtaaatttttgaaatgctagtaatgtgttttcaccagcaagtatttgttgcaacttaatgtcattttccttaagatggttacagctatgtaacctgtattattctggacggacttattaaaatacaaacagacaaaaaataaaacaaaacttgagttctatttaccttgcacattttttgttgttacagtgaaaaaaatggtccaagaaaatgtttgccatttttgcattgtttcgtttttaactggaacatttagaaagaaggaaatgaatgtgcattttattaattccttaggggcacaaggaggacaataatagctgatcttttgaaatttgaaaaacgtctttagatgaccaagcaaaaagactttaaaaaatggtaatgaaaatggaatgcagctactgcagctaataaaaaattttagatagcaattgttacaaccatatgcctttatagctagacattagaattatgatagcatgagtttatacattctattatttttcctccctttctcatgtttttataaataggtaataaaaaatgttttgcctgccaattgaatgatttcgtagctgaagtagaaacatttaggtttctgtagcattaaattgtgaagacaactggagtggtacttactgaagaaactctctgtatgtcctagaataagaagcaatgatgtgctgcttctgatttttcttgcattttaaattctcagccaacctacagccatgatctttagcacagtgatatcaccatgacttcacagacatggtctagaatctgtacccttacccacatatgaagaataaaattgattaaaggtt

SEQ ID NO: 54 - protein, 188 aa, Homo sapiens
MDVNIAPLRAWDDFFPGSDRFARPDFRDISKWNNRVVSNLLYYQTNYLVVAAMMISIVGFLSPFNMILGGIVVVLVFTGFVWAAHNKDVLRRMKKRYPTTFVMVVMLASYFLISMFGGVMVFVFGITFPLLLMFIHASLRLRNLKNKLENKMEGIGLKRTPMGIVLDALEQQEEGINRLTDYISKVKE

SEQ ID NO: 55 - DNA, 2348 bp, Homo sapiens
  CDS (64)..(1155)
tgaaccctgaagtcggtgtctgctgcgttcacggcaggattcggttaggaggaacagcacagcatgctgggctctggatttaaagctgagcgcttaagagtgaatttgagattagtcataaatcgccttaaactattggagaaaaagaaaacggaactggcccagaaagcaaggaaggagattgctgactatctggctgctgggaaagatgaacgagctcggatccgtgtggagcacattatccgggaagactacctcgtggaggccatggagatcctggagctgtactgtgacctgctgctggctcggtttggccttatccagtctatgaaggaactagattctggtctggctgaatctgtgtctacattgatctgggctgctcctcgactccagtcagaagtggctgagttgaaaatagttgctgatcagctctgtgccaagtatagcaaggaatatggcaagctatgtaggaccaaccagattggaactgtgaatgacaggctaatgcacaagctgagtgtggaagccccacccaaaatcctggtggagagatacctgattgaaattgcaaagaattacaacgtaccctatgaacctgactctgtggtcatggcagaagctcctcctggggtagagacagatcttattgatgttggattcacagatgatgtgaagaaaggaggccctggaagaggagggagtggtggcttcacagcaccagttggtggacctgatggaacggtgccaatgcccatgcccatgcccatgccatctgcaaatacgcctttctcatatccactgccaaagggaccatcagatttcaatggactgccaatggggacttatcaggcctttcccaatattcatccacctcagataccagcaactcccccatcgtatgaatctgtagatgacattaatgctgataagaatatctcttctgcacagattgttggtcctggacccaagccagaagcctctgcaaagcttccttccagacctgcagataactatgacaactttgtcctaccagagttgccatctgtgccagacacactaccaactgcatctgctggtgccagcacctcagcatctgaagacattgactttgatgatctttcccggaggtttgaagagctgaaaaagaaaacataggtctcttaaaccaggcaactttcacgttttgggagttgagactgagcaatttctccttgtaacaaagaatctccatgaaattctgtttcatctgttaaccgtcactcagcacaacactccctctgggctctcttcctgctcctccagattctgctgctttccagttctctgttgatcctgagactaacaattggagactgaggccagagcaactggctcctggcagctgtgcttgtccgcttcctgtcagagtgatcccaggtttcctcctggcccgtcccatggtccctccacaggagtgtgagaggatgggggaagcactgtgggaagaccaccaaagatggctggacagtgggagagagcacgttgtgaagcatcccagcctcgtgttgaggttccagacttagaaacagacccctctgtacagggggattgtggtgagtgagaatcaaggccaccttgtgtgttttctcactctcgaatgcaagtgggagagggaaaatgactcgggacgccattgtaacggttcctggaagctgggccctctcattggcatatacagtactcctcgctgcagggcactgtcccaccgggatccagttgcaaagtttgtcttgacagttgaaggcctcgcttagttgtactggattctcagggagccctctgtggccttttgctttgcgtgctgtttcccttgtaccagagggcggcaccgtggaaattctgttttccctgtagcatattgtgttggattgcattactggcagagaaaggacaaggtgccattcaagtcctagggtgggcttccagctgccttaatagaagtactcaagtcttttgggtagtgagctggaaagcctacaggaaaagaggggtacctgttttcatttgaaaactttgattcatggaacctttaaaactaatctcagaaaaatttttggtgcccatgcagctgtagttgttcactgctttcctggatggatgggactcttatgtcataacttctgttactcctttggcccatagctaaggtcatccttccccacaggggtggctttgggattggatgatacagcttttgcttctgtgtagtatacctgtacatacttgtttcaggcagcctttctttaatgttttcagttggtttgtattttgtagctcagtagctgctaataaagttaaagatcctg

SEQ ID NO: 56 - protein, 364 aa, Homo sapiens
MLGSGFKAERLRVNLRLVINRLKLLEKKKTELAQKARKEIADYLAAGKDERARIRVEHIIREDYLVEAMEILELYCDLLLARFGLIQSMKELDSGLAESVSTLIWAAPRLQSEVAELKIVADQLCAKYSKEYGKLCRTNQIGTVNDRLMHKLSVEAPPKILVERYLIEIAKNYNVPYEPDSVVMAEAPPGVETDLIDVGFTDDVKKGGPGRGGSGGFTAPVGGPDGTVPMPMPMPMPSANTPFSYPLPKGPSDFNGLPMGTYQAFPNIHPPQIPATPPSYESVDDINADKNISSAQIVGPGPKPEASAKLPSRPADNYDNFVLPELPSVPDTLPTASAGASTSASEDIDFDDLSRRFEELKKKT

SEQ ID NO: 57 - DNA, 1363 bp, Homo sapiens
  CDS (35)..(541)
agattctggaggcgaagaacgcaaagctgagaacatggacgttaatatcgccccactccgcgcctgggacgatttcttcccgggttccgatcgctttgcccggccggacttcagggacatttccaaatggaacaaccgcgtagtgagcaacctgctctattaccagaccaactacctggtggtggctgccatgatgatttccattgtggggtttctgagtcccttcaacatgatcctgggaggaatcgtggtggtgctggtgttcacagggtttgtgtgggcagcccacaataaagacgtccttcgccggatgaagaagcgctaccccacgacgttcgttatggtggtcatgttggcgagctatttccttatctccatgtttggaggagtcatggtctttgtgtttggcattacttttcctttgctgttgatgtttatccatgcatcgttgagacttcggaacctcaagaacaaactggagaataaaatggaaggaataggtttgaagaggacaccgatgggcattgtcctggatgccctataacagcaggaagaaggcatcaacagactcactgactatatcagcaaagtgaaggaataaacataacttacctgagctagggttgcagcagaaattgagttgcagcttgcccttgtccagacctattttctgcttgcgtttttgaaacaggaggtgcacgtaccacccaattatctatggcagcatgcatgtataggccgaactattatcagctctgatgtttcagagagaagacctcagaaaccgaaagaaaaccaccaccctcctattgtgtctgaagtttcacgtgtgtttatgaaatctaatgggaaatggatcacacgatttctttaagggaattaaaaaaaataaaagaattacggcttttacagcaacaatacgattatcttataggaaaaaaaaaatcattgtaaagtatcaagacaatacgagtaaatgaaaaggctgttaaagtagatgacatcatgtgttagcctgttcctaatcccctagaattgtaatgtgtgggatataaattagtttttattattctcttaaaaatcaaagatgatctctatcactttgccacctgtttgatgtgcagtggaaactggttaagccagttgttcatacttcgtttacaaatataaagatagctgtttaggatattttgttacatttttgtaaatttttgaaatgctagtaatgtgttttcaccagcaagtatttgttgcaaacttaatgtcattttccttaagatggttacagctatgtaacctgtattattctggacggacttattaaaatacaaacagacaaaaaataaaacaaaacttgagttct

SEQ ID NO: 58 - protein, 169 aa, Homo sapiens
MDVNIAPLRAWDDFFPGSDRFARPDFRDISKWNNRVVSNLLYYQTNYLVVAAMMISIVGFLSPFNMILGGIVVVLVFTGFVWAAHNKDVLRRMKKRYPTTFVMVVMLASYFLISMFGGVMVFVFGITFPLLLMFIHASLRLRNLKNKLENKMEGIGLKRTPMGIVLDAL

SEQ ID NO: 59 - DNA, 1554 bp, Homo sapiens
  CDS (98)..(769)
gtgctgaggccgagggagtcgccattttggatggtgaaccctgaagtcggtgtctgctgcgttcacggcaggattcggttaggaggaacagcacagcatgctgggctctggatttaaagctgagcgcttaagagtgaatttgagattagtcataaatcgccttaaactattggagaaaaagaaaacggaactggcccagaaagcaaggaaggagattgctgactatctggctgctgggaaagatgaacgagctcggatccgtgtggagcacattatccgggaagactacctcgtggaggccatggagatcctggagctgtactgtgacctgctgctggctcggtttggccttatccagtctatgaaggaactagattctggtctggctgaatctgtgtctacattgatctgggctgctcctcgactccagtcagaagtggctgagttgaaaatagttgctgatcagctctgtgccaagtatagcaaggaatatggcaagctatgtaggaccaaccagattggaactgtgaatgacaggctaatgcacaagctgagtgtggaagccccacccaaaatcctggtggagagatacctgattgaaattgcaaagaattacaacgtaccctatgaacctgactctgtggtcatggtccctccacaggagtgtgagaggatgggggaagcactgtgggaagaccaccaaagatggctggacagtgggagagagcacgttgtgaagcatcccagcctcgtgttgaggttccagacttagaaacagacccctctgtacagggggattgtggtgagtgagaatcaaggccaccttgtgtgttttctcactctcgaatgcaagtgggagagggaaaatgactcgggacgccattgtaacggttcctggaagctgggccctctcattggcatatacagtactcctcgctgcagggcactgtcccaccgggatccagttgcaaagtttgtcttgacagttgaaggcctcgcttagttgtactggattctcagggagccctctgtggccttttgctttgcgtgctgtttcccttgtaccagagggcggcaccgtggaaattctgttttcctgtagcatattgtgttggattgcattactggcagagaaaggacaaggtgccattcaagtcctagggtgggcttccagctgccttaatagaagtactcaagtcttttgggtagtgagctggaaagcctacaggaaaagaggggtacctgttttcatttgaaaactttgattcatggaacctttaaaactaatctcggaaaaatttttggtgcccatgcagctgtagttgttcactgctttcctggatggatgggactcttatgtcataacttctgttactcctttggcccatagctaaggtcatccttccccacaggggtggctttgggattggatgatacagcttttgcttctgtgtagtatacctgtacatacttgtttcaggcagcctttctttaatgttttcagttggtttgtattctgtagctcagtagctgctaataaagttaaagatcctg

SEQ ID NO: 60 - protein, 224 aa, Homo sapiens
MLGSGFKAERLRVNLRLVINRLKLLEKKKTELAQKARKEIADYLAAGKDERARIRVEHIIREDYLVEAMEILELYCDLLLARFGLIQSMKELDSGLAESVSTLIWAAPRLQSEVAELKIVADQLCAKYSKEYGKLCRTNQIGTVNDRLMHKLSVEAPPKILVERYLIEIAKNYNVPYEPDSVVMVPPQECERMGEALWEDHQRWLDSGREHVVKHPSLVLRFQT

SEQ ID NO: 61 - DNA, 2255 bp, Homo sapiens
  CDS (53)..(1057)
gtcggtgtctgctgcgttcacggcaggattcggttaggaggaacagcacagcatgctgggctctggatttaaagctgagcgcttaagagtgaatttgagattagtcataaatcgccttaaactattggagaaaaagaaaacggaactggcccagaaagcaaggaaggagattgctgactatctggctgctgggaaagatgaacgagctcggatccgtgtggagcacattatccgggaagactacctcgtggaggccatggagatcctggagctgtactgtgacctgctgctggctcggtttggccttatccagtctatgaaggaactagattctggtctggctgaatctgtgtctacattgatctgggctgctcctcgactccagtcagaagtggctgagttgaaaatagttgctgatcagctctgtgccaagtatagcaaggaatatggcaagctatgtaggaccaaccagattggaactgtgaatgacaggctaatgcacaagctgagtgtggaagccccacccaaaatcctggtggagagatacctgattgaaattgcaaagaattacaacgtaccctatgaacctgactctgtggtcatggcagaagctcctcctggggtagagacagatcttattgatgttggattcacagatgatgtgaagaaaggaggccctggaagaggagggagtggtggcttcacagcaccagttggtggacctgatggaacggtgccaatgcccatgcccatgcccatgcctatgccatctgcaaatacgcctttctcatatccactgccaaagggaccagtagatgacattaatgctgataagaatatctcttctgcacagattgttggtcctggacccaagccagaagcctctgcaaagcttccttccagacctgcagataactatgacaactttgtcctaccagagttgccatctgtgccagacacactaccaactgcatctgctggtgccagcacctcagcatctgaagacattgactttgatgatctttcccggaggtttgaagagctgaaaaagaaaacataggtctcttaaaccaggcaactttcacgttttgggagttgagactgagcaatttctccttgtaacaaagaatctccatgaaattctgtttcatctgttaaccgtcactcagcacaacactccctctgggctctcttcctgctcctccagattctgctgctttccagttctctgttgatcctgagactaacaattggagactgaggccagagcaactggctcctggcagctgtgcttgtccgtttcctgtcagagtgatcccaggtttcctcctggcccgtcccatggtccctccacaggagtgtgagaggatgggggaagcactgtgggaagaccaccaaagatggctggacagtgggagagagcacgttgtgaagcatcccagcctcgtgttgaggttccagacttagaaacagacccctctgtacagggggattgtggtgagtgagaatcaaggccaccttgtgtgttttctcactctcgaatgcaagtgggagagggaaaatgactcgggacgccattgtaacggttcctggaagctgggccctctcattggcatatacagtactcctcgctgcagggcactgtcccaccgggatccagttgcaaagtttgtcttgacagttgaaggcctcgcttagttgtactggattctcagggagccctctgtggccttttgctttgcgtgctgtttcccttgtaccagagggcggcaccgtggaaattctgttttccctgtagcatattgtgttggattgcattactggcagagaaaggacaaggtgccattcaagtcctagggtgggcttccagctgccttaatagaagtactcaagtcttttgggtagtgagctggaaagcctacaggaaaagaggggtacctgttttcatttgaaaactttgattcatggaacctttaaaactaatctcagaaaaatttttggtgcccatgcagctgtagttgttcactgctttcctggatggatgggactcttatgtcataacttctgttactcctttggcccatagctaaggtcatccttccccacaggggtggctttgggattggatgatacagcttttgcttctgtgtagtatacctgtacatacttgtttcaggcagcctttctttaatgttttcagttggtttgtattctgtagctcagtagctgctaataaagttaaagatcctgtgtcc

SEQ ID NO: 62 - protein, 335 aa, Homo sapiens
MLGSGFKAERLRVNLRLVINRLKLLEKKKTELAQKARKEIADYLAAGKDERARIRVEHIIREDYLVEAMEILELYCDLLLARFGLIQSMKELDSGLAESVSTLIWAAPRLQSEVAELKIVADQLCAKYSKEYGKLCRTNQIGTVNDRLMHKLSVEAPPKILVERYLIEIAKNYNVPYEPDSVVMAEAPPGVETDLIDVGFTDDVKKGGPGRGGSGGFTAPVGGPDGTVPMPMPMPMPMPSANTPFSYPLPKGPVDDINADKNISSAQIVGPGPKPEASAKLPSRPADNYDNFVLPELPSVPDTLPTASAGASTSASEDIDFDDLSRRFEELKKKT

SEQ ID NO: 63 - DNA, 2349 bp, Homo sapiens
  CDS (63)..(1142)
gaaccctgaagtcggtgtctgctgcgttcacggcaggattcggttaggaggaacagcacagcatgctgggctctggatttaaagctgagcgcttaagagtgaatttgagattagtcataaatcgccttaaactattggagaaaaagaaaacggaactggcccagaaagcaaggaaggagattgctgactatctggctgctgggaaagatgaacgagctcggatccgtgtggagcacattatccgggaagactacctcgtggaggccatggagatcctggagctgtactgtgacctgctgctggctcggtttggccttatccagtctatgaaggaactagattctggtctggctgaatctgtgtctacattgatctgggctgctcctcgactccagtcagaagtggctgagttgaaaatagttgctgatcagctctgtgccaagtatagcaaggaatatggcaagctatgtaggaccaaccagattggaactgtgaatgacaggctaatgcacaagctgagtgtggaagccccacccaaaatcctggtggagagatacctgattgaaattgcaaagaattacaacgtaccctatgaacctgactctgtggtcatggcagaagctcctcctggggtagagacagatcttattgatgttggattcacagatgatgtgaagaaaggaggccctggaagaggagggagtggtggcttcacagcaccagttggtggacctgatggaacggtgccaatgcccatgcccatgcccatgcctatgccatctgcaaatacgcctttctcatatccactgccaaagggaccatcagatttcaatggactgccaatggggacttatcaggcctttcccaatattcatccacctcagataccagcaactcccccatcgtatgaatctatgacattaatgctgataagaatatctcttctgcacagattgttggtcctggacccaagccagaagcctctgcaaagcttccttccagacctgcagataactatgacaactttgtcctaccagagttgccatctgtgccagacacactaccaactgcatctgctggtgccagcacctcagcatctgaagacattgactttgatgatctttcccggaggtttgaagagctgaaaaagaaaacataggtctcttaaaccaggcaactttcacgttttgggagttgagactgagcaatttctccttgtaacaaagaatctccatgaaattctgtttcatctgttaaccgtcactcagcacaacactccctctgggctctcttcctgctcctccagattctgctgctttccagttctctgttgatcctgagactaacaattggagactgaggccagagcaactggctcctggcagctgtgcttgtccgtttcctgtcagagtgatcccaggtttcctcctggcccgtcccatggtccctccacaggagtgtgagaggatgggggaagcactgtgggaagaccaccaaagatggctggacagtgggagagagcacgttgtgaagcatcccagcctcgtgttgaggttccagacttagaaacagacccctctgtacagggggattgtggtgagtgagaatcaaggccaccttgtgtgttttctcactctcgaatgcaagtgggagagggaaaatgactcgggacgccattgtaacggttcctggaagctgggccctctcattggcatatacagtactcctcgctgcagggcactgtcccaccgggatccagttgcaaagtttgtcttgacagttgaaggcctcgcttagttgtactggattctcagggagccctctgtggccttttgctttgcgtgctgtttcccttgtaccagagggcggcaccgtggaaattctgttttccctgtagcatattgtgttggattgcattactggcagagaaaggacaaggtgccattcaagtcctagggtgggcttccagctgccttaatagaagtactcaagtcttttgggtagtgagctggaaagcctacaggaaaagaggggtacctgttttcatttgaaaactttgattcatggaacctttaaaactaatctcagaaaaatttttggtgcccatgcagctgtagttgttcactgctttcctggatggatgggactcttatgtcataacttctgttactcctttggcccatagctaaggtcatccttccccacaggggtggctttgggattggatgatacagcttttgcttctgtgtagtatacctgtacatacttgtttcaggcagcctttctttaatgttttcagttggtttgtattctgtagctcagtagctgctaataaagttaaagatcctg

SEQ ID NO: 64 - protein, 360 aa, Homo sapiens
MLGSGFKAERLRVNLRLVINRLKLLEKKKTELAQKARKEIADYLAAGKDERARIRVEHIIREDYLVEAMEILELYCDLLLARFGLIQSMKELDSGLAESVSTLIWAAPRLQSEVAELKIVADQLCAKYSKEYGKLCRTNQIGTVNDRLMHKLSVEAPPKILVERYLIEIAKNYNVPYEPDSVVMAEAPPGVETDLIDVGFTDDVKKGGPGRGGSGGFTAPVGGPDGTVPMPMPMPMPMPSANTPFSYPLPKGPSDFNGLPMGTYQAFPNIHPPQIPATPPSYESMTLMLIRISLLHRLLVLDPSQKPLQSFLPDLQITMTTLSYQSCHLCQTHYQLHLLVPAPQHLKTLTLMIFPGGLKS

SEQ ID NO: 65 - DNA, 3550 bp, Homo sapiens
  CDS (181)..(1401)
actgggcccgggacgcgccggcggcggcggagactccggggctgcggcgccgcccgccccgcccgcagagtccggctgccgcgcatcgtccgcagacgccgccaccgccatgggctcctgaggctagcttgtcactttctgcaaaggtttccctcagggagcctcctgctgccaggcaccatgacagtgaggggggatgtgctggccccggatccagcgtcgcccacgaccgcagcagcctcgcccagcgtctccgtgatccccgagggcagccccactgccatggagcagcctgtgttcctgatgacaactgccgctcaggccatctctggcttcttcgtgtggacggccctgctcatcacatgccaccagatctacatgcacctgcgctgctacagctgccccaacgagcagcgctacatcgtgcgcatcctcttcatcgtgcccatctacgcctttgactcctggctcagcctcctcttcttcaccaacgaccagtactacgtgtacttcggcaccgtccgcgactgctatgaggccttggtcatctataatttcctgagcctgtgctatgagtacctaggaggagaaagttccatcatgtcggagatcagaggaaaacccattgagtccagctgtatgtatggcacctgctgcctctggggaaagacttattccatcggatttctgaggttctgcaaacaggccaccctgcagttctgtgtggtgaagccactcatggcggtcagcactgtggtcctccaggccttcggcaagtaccgggatggggactttgacgtcaccagtggctacctctacgtgaccatcatctacaacatctccgtcagcctggccctctacgccctcttcctcttctacttcgccacccgggagctgctcagcccctacagccccgtcctcaagttcttcatggtcaagtccgtcttctttctttccttctggcaaggcatgctcctggccatcctggagaagtgtggggccatccccaaaatccactcggcccgcgtgtcggtgggcgagggcaccgtggctgccggctaccaggacttcatcatctgtgtggagatgttctttgcagccctggccctgcggcacgccttcacctacaaggtctatgctgacaagaggctggacgcacaaggccgctgtgcccccatgaagagcatctccagcagcctcaaggagaccatgaacccgcacgacatcgtgcaggacgccatccacaacttctcacctgcctaccagcagtacacgcagcagtccaccctggagcctgggcccacctggcgtggtggcgcccacggcctctcccgctcccacagcctcagtggcgcccgcgacaacgagaagactctcctgctcagctctgatgatgaattctaggtgcgggctgcagtggcggaagtgctggcgccatagccacggtcaggctgtgccccacctccagcctcaccaccaggccaggaggcagctggcacagtgctcacgccgcctttatttattggaccagaaacactcacatgtcacttccagaggaacgggggacagccaggctcgcccatgggccttcaggaatatttatacatggcccagcctgcactgcccgggcgagggcagaggacactgggagcaaggcttatgcccctgctgcccgtcctgtgctgggggcatgctgggaccagccgcacccaggccccaatgcttgtgtgtggaccagcggctgcagccttctagcccctcctccccgcgagactctcaggctgaggtcggcaagccgtggctcccccacacaccgtgcaataccctgtctgacctgggctcttcccgcctgcatccctcccctgtccacctttgtccagtgctagattcacctcaccccgggcaggagtggggatgtgggcgctctgtggtcctcccctcctgacccaggcctctgtggcatgctgcaaggatcagagccagacaccaggagtcacaggccccacccaggaagggcattcagggcccctgggcaccgcttctgttgaagcaggggcttctgggcccctgggtatccccacctgtcgtggccacacctctgcctgcctcatgccccttccccctggcctaccaaggacagcccacagcccgcactgccggctcacttgggtccttcctcgatagctttgggcagagcccttgcttcctggctgcttcagggctcaggggctcccagccctccttcccaggctgatgctgggtcctctctctctttggggcttctccctcccgtttcaggggaaaggtctgagtctccacgtttcagaccagcttctgggggaaggcagtccggcagggagaccgggaggggtggccacacagtggggagctgggaggtggggggaatggtcccagactcctctcggggcccctatccacacagggcctggtgttctaccccatctggcccctggcccatctcttctgtgccttagtcacatatgaaagcgcccctccctggctccccatctgtcccacacgctccctggggctcttagttcagctgctggcactcgcaggatcctgcagtgctgggcccagagcccttggacaggcctcaggagtggtcaggaccaccaagcccctcctctccccctccacacctctagacctggggcctccggaacccccagcaggctgggcttatactagctcctgacttaggaagagcctcgtgtcacaacacgtgtccctacaggcaaagtgtcctggcatttaaaacccagattatccctgggtttgggctgcagtcacctggagaagctggtagggtaagggagagggaccctgccggtgttcactggggattctttcttttggtccttcctggaatgaacaggttccctccctgccacctgtgaggagagttggggcccagccgtcttcctggcctccttcctttcctcgtggcagaggcctgcatgtgggtgccagaggccagctctccccctccatcttgggggggcggagcagttgggcccaagctgcccgggagggtgggtgcagacacaggctgaggaccagccctggccctgccccgccatctgctttcaccaagctgtctctccaccgtggcttcccttctccctccaggccaaagtgctgctgattcccactcccttggttttcgcctgcccagcgttgctgtttgcgtggagggtggggggagctcagtggcagggaatcagcggtccgtggggtcgtggggacgggaacatgtgcccgaccgctccatcccctcctcctccttaggatgcataacctaccttgtctttttttttttttaaattttctttccaggtagagtagctctttgtacataaagaatacttgaaaaattaattgtatgatgtatgagaagacagagtctcctagttttgtatcttgttgtatgactgccatgagttccaccagaaagccactctattttggtctctgtgacattttaaatgcgtgacagaagtgagcaaataaagtgaggaagaaatct

SEQ ID NO: 66 - protein, 407 aa, Homo sapiens [sequence omitted]

SEQ ID NO: 67 - DNA, 621 bp, Homo sapiens
  CDS (54)..(389)
acattgtgcaaaccttctctcctgtcaacagcggccagcctcccaactacgagatgctcaaggaggagcaggaagtggctatgctgggggtgccccacaaccctgctcccccgatgtccaccgtgatccacatccgcagcgagacctccgtgcctgaccatgtggtctggtccctgttcaacaccctctccatgaacacctgctgcctgggcttcatagcattcgcgtactccgtgaagtctagggacaggaagatggttggcgacgtgaccggggcccaggcctatgcctccaccgccaagtgcctgaacatctgggccctgattttgggcatcttcatgaccattctgctcatcatcatcccagtgttggtcgtccaggcccagcgatagatcaggaggcatcattgaggccaggagctctgcccgtgacctgtatcccacgtactctatcttccattcctcgccctgcccccagaggccaggagctctgcccttgacctgtattccacttactccaccttccattcctcgccctgtccccacagccgagtcctgcatcagccctttatcctcacacgcttttctacaatggcattcaataaagtgtatatgtttctgg

SEQ ID NO: 68 - protein, 112 aa, Homo sapiens
MLKEEQEVAMLGVPHNPAPPMSTVIHIRSETSVPDHVVWSLFNTLSMNTCCLGFIAFAYSVKSRDRKMVGDVTGAQAYASTAKCLNIWALILGIFMTILLIIIPVLVVQAQR

SEQ ID NO: 69 - DNA, 905 bp, Homo sapiens
  CDS (280)..(675)
caacacaggggcagtctccaggacctccacaccattaacaagatgagccttgtgctcccttgggctctagagaggaagcccctctgagccctcagcccctctttcctccctctcctaaagtaatttgatcctcaggaatttgttctgccctcatctggccctggccagctctgcatttgacaaatgccaggaagaggaaactgttgagaaaacggaactactggggaaagggagggctcactgagaaccatcccggtaacccgaccgccgctggtcaccatgaaccacattgtgcaaaccttctctcctgtcaacagcggccagcctcccaactacgagatgctcaaggaggagcaggaagtggctatgctgggggggccccacaaccctgctcccccgacgtccaccgtgatccacatccgcagcgagacctccgtgcctgaccatgtcgtctggtccctgttcaacaccctcttcatgaacacctgctgcctgggcttcatagcattcgcctactccgtgaagtctagggacaggaagatggttggcgacgtgaccggggcccaggcctatgcctccaccgccaagtgcctgaacatctgggccctgattttgggcatcttcatgaccattctgctcgtcatcatcccagtgttggtcgtccaggcccagcgatagatcaggaggcatcattgaggccaggagctctgcccgtgacctgtatcccacgtactctatcttccattcctcgccctgcccccagaggccaggagctctgcccttgacctgtattccacttactccaccttccattcctcgccctgtccccacagccgagtcctgcatcagccctttatcctcacacgcttttctacaatggcattcaataaagtgtatatgtttct

SEQ ID NO: 70 - protein, 132 aa, Homo sapiens
MNHIVQTFSPVNSGQPPNYEMLKEEQEVAMLGGPHNPAPPTSTVIHIRSETSVPDHVVWSLFNTLFMNTCCLGFIAFAYSVKSRDRKMVGDVTGAQAYASTAKCLNIWALILGIFMTILLVIIPVLVVQAQR

SEQ ID NO: 71 - DNA, 606 bp, Homo sapiens
  CDS (45)..(443)
aaccatcccagtaacccgaccgccgctggtcttcgctggacaccatgaatcaaactgtccaaaccttcttctctcctgtcaacagcggccagccccccaactatgagatgctcaaggaggagcacgaggtggctgtgctgggggcgccccacaaccctgctcccccgacgtccaccgtgatccacatccgcagcgagacctccgtgcccgaccatgtcgtctggtccctgttcaacaccctcttcatgaacccctgctgcctgggcttcatagcattcgcctactccgtgaagtctagggacaggaagatggttggcgacgtgaccggggcccaggcctatgcctccaccgccaagtgcctgaacatctgggccctgattctgggcatcctcatgaccattctgctcatcgtcatcccagtgctgatcttccaggcctatggatagatcaggaggcatcactgagaccaggagctctgcccatgacctgtatcccacgtactccaacttccattcctcgccctgcccccggagccgagtcctgtatcagccctttatcctcacacgcttttctacaatggcattcaataaagtgcacgtgtttctg

SEQ ID NO: 72 - protein, 133 aa, Homo sapiens [sequence omitted]

SEQ ID NO: 73 - DNA, 808 bp, Homo sapiens
  CDS (238)..(636)
tgctcccttgggctctagagaggaggcccctcttagccctcagcccctccttcctctctatcttaaagtaatttgatcctcaggaatttgttccgccctcatctggcccggccaaatcccgatttgacaaatgccaggaaaaggaaactgttgagaaaccgaaactactggggaaagggagggctcactgagtaaccatcccagtaacccgaccgccgctggtcttcgctggacaccatgagtcacactgtccaaaccttcttctctcctgtcaacagtggccagccccccaactatgagatgctcaaggaggagcacgaggtggctgtgctgggggggccccacaaccctgctcccccgacgtccaccgtgatccacatccgcagcgagacctccgtgcccgaccatgtcgtctggtccctgttcaacaccctcttcatgaacccctgctgcctgggcttcatagcattcgcctactccgtgaagtctagggacaggaagatggttggcgacgtgaccggggcccaggcctatgcctccaccgccaagtgcctgaacatctgggccctgattctgggcatcctcatgaccattctgctcatcgtcatcccagtgctgatcttccaggcctatggatagatcaggaggcatcactgaggccaggagctctgcccatgacctgtatcccacgtactccaacttccattcctcgccctgcccccggagccgagtcctgtatcagccctttatcctcacacgcttttctacaatggcattcaataaagtgcacgtgtttctggtgctgctg

SEQ ID NO: 74 - protein, 133 aa, Homo sapiens
MSHTVQTFFSPVNSGQPPNYEMLKEEHEVAVLGGPHNPAPPTSTVIHIRSETSVPDHVVWSLFNTLFMNPCCLGFIAFAYSVKSRDRKMVGDVTGAQAYASTAKCLNIWALILGILMTILLIVIPVLIFQAYG

SEQ ID NO: 75 - DNA, 621 bp, Homo sapiens
  CDS (60)..(458)
ggagggctcactgagaaccatcccagtaacccgaccgccgctggtcttcgctggacaccatgaatcacactgtccaaaccttcttctctcctgtcaacagtggccagccccccaactatgagatgctcaaggaggagcacgaggtggctgtgctgggggcgccccacaaccctgctcccccgacgtccaccgtgatccacatccgcagcgagacctccgtgcccgaccatgtcgtctggtccctgttcaacaccctcttcatgaacccctgctgcctgggcttcatagcattcgcctactccgtgaagtctagggacaggaagatggttggcgacgtgaccggggcccaggcctatgcctccaccgccaagtgcctgaacatctgggccctgattctgggcatcctcatgaccattctgctcatcgtcatcccagtgctgatcttccaggcctatggatagatcaggaggcatcactgaggccaggagctctgcccatgacctgtatcccacgtactccaacttccattcctcgccctgcccccggagccgagtcctgtatcagccctttatcctcacacgcttttctacaatggcattcaataaagtgcacgtgtttctg

SEQ ID NO: 76 - protein, 133 aa, Homo sapiens
MNHTVQTFFSPVNSGQPPNYEMLKEEHEVAVLGAPHNPAPPTSTVIHIRSETSVPDHVVWSLFNTLFMNPCCLGFIAFAYSVKSRDRKMVGDVTGAQAYASTAKCLNIWALILGILMTILLIVIPVLIFQAYG

SEQ ID NO: 77 - DNA, 1846 bp, Homo sapiens
  CDS (128)..(877)
atttcggctctgagcggctgggcgaccggcgcgtcgtgcggggctgcggcggagcctccttaaggaaggtgcaagaggttggcagcttcgattgaagcacatcgaccggcgacagcagccaggagtcatgagcgacagcggcgagcagaactacggcgagcgggaatcccgatctgaatctaggtctagatccagaagaagctcccgaaggcattatacccggtcacggtctcgctcccgctcccatagacgatcacgtagcaggtcttacagtcgagattatcgtagacggcacagccacagccattctcccatgtctactcgcaggcgtcatgttgggaatcgggcaaatcctgatcctaactgttgtcttggagtatttgggctgagcttgtacaccacagaaagagatctaagagaagtgttctctaaatatggtcccattgccgatgtgtctattgtatatgaccagcagtctaggcgttcaagaggatttgcctttgtatattttgaaaatgtagatgatgccaaggaagctaaagaacgtgccaatggaatggagcttgatgggcgtaggatcagagttgatttctctataacaaaaagaccacatacgccaacaccaggaatttacatggggagacctacctatggcagctctcgccgtcgggattactatgacagaggatatgatcggggctatgatgatcgggactactatagcagatcatacagaggaggaggtggaggaggaggaggatggagagctgcccaagacagggatcagatttatagaaggcggtcaccttctccttactatagtcgtggaggatacagatcacgttccagatctcgatcatactcacctcgtcgctattaaagcatgaagactttctgaaacctgccctagagctgggatattgtttgtgggcaatattttttattgtctcttgtttaaaaagtgaacagtgcctagtgaagttaggtgacttttacaccttttacgatgactacttttggtggagttgaaatgctgttttcattctgcatttgtgtagtttggtgctttgttccaagttaagtgttttcagaaaagtatgttttgcatgtatttttttacagtctaaattttgactgctgagaagtttctattgtacaaaacttcatttaaaaggtttttctactgaatccagggtattctgaagatcgaagcctgtgtaaaatgctaccaaatggcaaaaagcaacaataaacagtttgatttttacttttctttctaacatatcaatgcttagcagaactattcagattgtcagtagtaaatttaaagacaaatgcccgttttcctccagtccatgaaacataccatacttatatacctgcaactaagtgtttaaaattatgctctgtaactctgtactgctagtattagaactaaaaatcttaaaatacagccagtgcttaatgcttatatcaatgtggatttgtcggcttttatgtaatctgtaatatgtatagcaggaaatacgaagagttacacagtgtatgccttaaaaggctgtttcttaaaggtgttacaaggggataatggtatttcaactagttatcagcaagtgacaatacattccaccacaaatacactcttgttcttctagcttttagactatatgaaaaaaccgggtgcttcaaagtacatgataagggaacactatacctgtcatggatgaactgaagactttgcctgttcattttttaaatattattttcaggtcctttgcttaccaaaggaggcccaatttcactcaaatgttttgagaactgtgtttaaataaacgcaaatgaaaag

SEQ ID NO: 78 - protein, 250 aa, Homo sapiens
MSDSGEQNYGERESRSESRSRSRRSSRRHYTRSRSRSRSHRRSRSRSYSRDYRRRHSHSHSPMSTRRRHVGNRANPDPNCCLGVFGLSLYTTERDLREVFSKYGPIADVSIVYDQQSRRSRGFAFVYFENVDDAKEAKERANGMELDGRRIRVDFSITKRPHTPTPGIYMGRPTYGSSRRRDYYDRGYDRGYDDRDYYSRSYRGGGGGGGGWRAAQDRDQIYRRRSPSPYYSRGGYRSRSRSRSYSPRRY

SEQ ID NO: 79 - DNA, 1964 bp, Homo sapiens
  CDS (130)..(993)
  unsure 38: n=A or C or G or T
acaacccggctctgagcggctgggcgaccggcgcgtcntgcggggctgcggcggagcctccttaaggaaggtgcaagaggttggcagcttcgattgaagcacatcgaccggcgacagcagccaggagtcatgagcgacagcggcgagcagaactacggcgagcgggaatcccgttctgcttccagaagtggaagtgctcacggatcggggaaatctgcaaggcatacccctgcaaggtctcgctccaaggaagattccaggcgttccagatcaaagtccaggtcccgatctgaatctaggtctagatccagaagaagctcccgaaggcattatacccggtcacggtctcgctcccgctcccatagacgatcacgtagcaggtcttacagtcgagattatcgtagacggcacagccacagccattctcccatgtctactcgcaggcgtcatgttgggaatcgggcaaatcctgatcctaactgttgtcttggagtatttgggctgagcttgtacaccacagaaagagatctaagagaagtgttctctaaatatggtcccattgccgatgtgtctattgtatatgaccagcagtctaggcgttcaagaggatttgcctttgtatattttgaaaatgtagatgatgccaaggaagctaaagaacgtgccaatggaatggagcttgatgggcgtaggatcagagttgatttctctataacaaaaagaccacatacgccaacaccaggaatttacatggggagacctacctatggcagctctcgccgtcgggattactatgacagaggatatgatcggggctatgatgatcgggactactatagcagatcatacagaggaggaggtggaggaggaggaggatggagagctgcccaagacagggatcagatttatagaaggcggtcaccttctccttactatagtcgtggaggatacagatcacgttccagatctcgatcatactcacctcgtcgctattaaagcatgaagactttctgaaacctgccctagagctgggatattgcttgtgggcaatattttttattgtctcttgtttaaaaagtgaacagtgcctagtgaagttaggtgacttttacaccttttacgatgactacttttggtggagttgaaatgctgttttcattctgcatttgtgtagtttggtgctttgttccaagttaagtgttttcagaaaagtatgttttgcatgtatttttttacagtctaaattttgactgctgagaagtttctattgtacaaaacttcatttaaaaggtttttctactgaatccaggggtattctgaagatcgaagcctgtgtaaaatgctaccaaatggcaaaaagcaacaataaacagtttgatttttacttttctttctaacatatcaatgcttagcagaactattcacattgtcagtagtaaatttaaagacaaatgcccgttttcctccagtccattgaacataccatacttatatacctgcaactaagtgtttaaaattatgctctgtaactctgtactgctagtattagaactaaaaatcttaaaatacagccagtgcttaatgcttatatcaatgtggatttgtcggcttttatgtaatctgtaatatgtatagcaggaaatacgaagagttacacagtgtatgccttaaaaggctgtttcttaaaggtgttacaaggggataatggtatttcaactagttatcagcaagtgacaatacattccaccacaaatacactcttgttcttctagcttttagactatatgaaaaaaccgggtgcttcaaagtacatgataagggaacactatacctgtcatggatgaactgaagactttgcctgttcattttttaaatattattttcaggtcctttgcttaccaaaggaggcccaatttcactcaaatgttttgagaactgtgtttaaataaacgcaaatgaaaaga

SEQ ID NO: 80 - protein, 288 aa, Homo sapiens
MSDSGEQNYGERESRSASRSGSAHGSGKSARHTPARSRSKEDSRRSRSKSRSRSESRSRSRRSSRRHYTRSRSRSRSHRRSRSRSYSRDYRRRHSHSHSPMSTRRRHVGNRANPDPNCCLGVFGLSLYTTERDLREVFSKYGPIADVSIVYDQQSRRSRGFAFVYFENVDDAKEAKERANGMELDGRRIRVDFSITKRPHTPTPGIYMGRPTYGSSRRRDYYDRGYDRGYDDRDYYSRSYRGGGGGGGGWRAAQDRDQIYRRRSPSPYYSRGGYRSRSRSRSYSPRRY

SEQ ID NO: 81 - DNA, 1504 bp, Homo sapiens
  CDS (307)..(918)
attttgtggcggcgctggaggctgcgttcggcaggcgctgcggagacgcgtagaggagcgcgccccccggccgctgccgcccctggcccgtgccgtcaccccgcttctccgcgcctcgggcggtacccagccagtccccagcgccgcgctaccgcgctgaccggccctccagacgcctcccggtacccgggaccccagcccggccgctcgcccgcagcccgccggccgcacacgtccccggagccgggcctagggcgggcggcagcggcggctcggcgcagtcaggctgggctctgtagcgtccccatggccgcggccggctggcgggacggctccggccaggagaagtaccggctcgtggtggtcggcgggggcggcgtgggcaagtcggcgctcaccatccagttcatccagtcctattttgtaacggattatgatccaaccattgaagattcttacacaaagcagtgtgtgatagatgacagagcagcccggctagatattttggatacagcaggacaagaagagtttggagccatgagagaacagtatatgaggactggcgaaggcttcctgttggtcttttcagtcacagatagaggcagttttgaagaaatctataagtttcaaagacagattctcagagtaaaggatcgtgatgagttcccaatgattttaattggtaataaagcagatctggatcatcaaagacaggtaacacaggaagaaggacaacagttagcacggcagcttaaggtaacatacatggaggcatcagcaaagattaggatgaatgtagatcaagctttccatgaacttgtccgggttatcaggaaatttcaagagcaggaatgtcctccttcaccagaaccaacacggaaagaaaaagacaagaaaggctgccattgtgtcattttctagaatcccttcagttttagctaccaacggccaggaaaagccctcatcttctctttctctcctcagtttacatcttgttggtacctttctagccttagacaaatgatcaccatgttagccttagacgaagaagctggctagtcctttctgtgaagctaatacaatggtcatttccagacaaatttaaaggaaacactaaggctgcttcaaagattatctgattcctttaaaatatatgtctatatacacagacatgctctttttttaagtgcttacattttaatagagatgaatcagttttggaatctaagctgtttgccaagctgaagctacaggttgtgaaataatttttaacttttggaatcatactgcctactgttactctaaatagaaatatggggttttttttaatgtgaatttttgcctatctttaaacatttcaatgtcagcctttgttaaccttaaatacactgaattgaatctacaaaagtgaaccatctcagacctttactgatactacaacttttgttttctgatggccaaaataccaaatgcctgttgtatttatggattaaaaactgcttat

SEQ ID NO: 82 - protein, 204 aa, Homo sapiens
MAAAGWRDGSGQEKYRLVVVGGGGVGKSALTIQFIQSYFVTDYDPTIEDSYTKQCVIDDRAARLDILDTAGQEEFGAMREQYMRTGEGFLLVFSVTDRGSFEEIYKFQRQILRVKDRDEFPMILIGNKADLDHQRQVTQEEGQQLARQLKVTYMEASAKIRMNVDQAFHELVRVIRKFQEQECPPSPEPTRKEKDKKGCHCVIF

SEQ ID NO: 83 - DNA, 612 bp, Homo sapiens
  CDS (1)..(609)
atggccgcggcggctggcggacggctccggcaggagaagtaccggctcgtggtggtcggcgggggcggcgtgggcaagtcggcgctcaccatccagttcatccagtcctattttgtaacggattatgatccaaccattgaagattcttacacaaagcagtgtgtgatagatgacagagcagcccggctagatattttggatacagcaggacaagaagagtttggagccatgagagaacagtatatgaggactggcgaaggcttcctgttggtcttttcagtcacagatagaggcagttttgaagaaatctataagtttcaaagacagattctcagagtaaaggatcgtgatgagttcccaatgattttaattggtaataaagcagatctggatcatcaaagacaggtaacacaggaagaaggacaacagttagcacggcagcttaaggtaacatacatggaggcatcagcaaagattaggatgaatgtagatcaagctttccatgaacttgtccgggttatcaggaaatttcaagagcaggaatgtcctccttcaccagaaccaacacggaaagaaaaagacaagaaaggctgccattgtgtcattttctag

SEQ ID NO: 84 - protein, 203 aa, Homo sapiens
MAAAAGGRLRQEKYRLVVVGGGGVGKSALTIQFIQSYFVTDYDPTIEDSYTKQCVIDDRAARLDILDTAGQEEFGAMREQYMRTGEGFLLVFSVTDRGSFEEIYKFQRQILRVKDRDEFPMILIGNKADLDHQRQVTQEEGQQLARQLKVTYMEASAKIRMNVDQAFHELVRVIRKFQEQECPPSPEPTRKEKDKKGCHCVIF

SEQ ID NO: 85 - DNA, 1782 bp, Homo sapiens
  CDS (313)..(825)
ttcgcctctcgggctggaaatgcagctattgaggtcttcgaatgctgcggagctggaggcggaggcagctggggaggtccgagcgatgtgaccaggccgccatcgctcgtctcttcctctctcctgccgcctcctgtctcgaaaataacttttttagtctaaagaaagaaagacaaaagtagtcgtccgcccctcacgccctctcttcctctcagccttccgcccggtgaggaagcccggggtggctgctccgccgtcggggccgcgccgccgagccccggccgccccgggccgcccccgcacgccgcccccatgcatcccttctacacccgggccgccaccatgataggcgagatcgccgccgccgtgtccttcatctccaagtttctccgcaccaaggggctcacgagcgagcgacagctgcagaccttcagccagagcctgcaggagctgctggcagaacattataaacatcactggttcccagaaaagccatgcaagggatcgggttaccgttgtattcgcatcaaccataaaatggatcctctgattggacaggcagcacagcggattggactgagcagtcaggagctgttcaggcttctcccaagtgaactcacactctgggttgacccctatgaagtgtcctacagaattggagaggatggctccatctgtgtgctgtatgaagcctcaccagcaggaggtagcactcaaaacagcaccaacgtgcaaatggtagacagccgaatcagctgtaaggaggaacttctcttgggcagaacgagcccttccaaaaactacaatatgatgactgtatcaggttaagatatagtctgtggatggatcatctgatgatgatggataaatttgatttttgctttgggtgggctcctcttggggatggattatggaatttaaaccatgtcacagctgtgaagatctggcacaagatagaatggtaaaaaaaaaaaaaaattttaagtgacagtgccatagtttggacagtacctttcaatgattaattttaatagcctgtgagtccaagtaaatgatcactttatttgctagggagggaagtcctagggtggtttcagtttctcccagacatacctaaatttttacatcaatccttttaaagaaaatctgtatttcaaagaatctttctctgcagtaaatctcgcaggggaatttgcactattacacttgaaagttgttattgttaaccttttcggcagcttttaataggaaagttaaacgttttaaacatggtagtactggaaattttacaagacttttacctagcacttaaatatgtataaatgtacataaagacaaactagtaagcatgacctggggaaatggtcagaccttgtattgtgtttttggccttgaaagtagcaagtgaccagaatctgccatggcaacaggctttaaaaaagacccttaaaaagacactgtctcaactgtggtgttagcaccagccagctctctgtacatttgctagcttgtagttttctaagactgagtaaacttcttatttttagaaagtggaggtctggtttgtaactttccttgtacttaattgggtaaaagtcttttccacaaaccaccatctattttgtgaactttgttagtcatcttttatttggtaaattatgaactggtgtaaatttgtacagttcatgtatattgattgtggcaaagttgtacagatttctatattttggatgagaaatttttcttctctctataataaatcgtttcttatcttggcatttt

SEQ ID NO: 86 - protein, 171 aa, Homo sapiens
MHPFYTRAATMIGEIAAAVSFISKFLRTKGLTSERQLQTFSQSLQELLAEHYKHHWFPEKPCKGSGYRCIRINHKMDPLIGQAAQRIGLSSQELFRLLPSELTLWVDPYEVSYRIGEDGSICVLYEASPAGGSTQNSTNVQMVDSRISCKEELLLGRTSPSKNYNMMTVSG

SEQ ID NO: 87 - DNA, 1744 bp, Homo sapiens
  CDS (215)..(1057)
agagcaagcggcctgtgcccagatcctgggagaaccccagccgagcccagcctagcccgagcccagcccgagcggagccggagccccaagcccgagccgcgcccagcccgagcagagccctccagccgctcaccccgcgtgccaccccagcgaccctcagccgctctctgcccttctctcggccccgcgcccgccctcgcggcccctctgcccaatgaaactggccgcgatgatcaagaagatgtgcccgagcgactcggagctgagtatcccggccaagaactgctatcgcatggtcatcctcggctcgtccaaggtgggcaagacggccatcgtgtcgcgcttcctcaccggccgcttcgaggacgcctacacgcctaccatcgaggacttccaccgcaagttctactccatccgcggcgaggtctaccagctcgacatcctcgacacgtccggcaaccacccgttccccgccatgcggcgcctctccatcctcacaggagacgttttcatcctggtgttcagtctggacaaccgcgactccttcgaggaggtgcagcggctcaggcagcagatcctcgacaccaagtcttgcctcaagaacaaaaccaaggagaacgtggacgtgcccctggtcatctgcggcaacaagggtgaccgcgacttctaccgcgaggtggaccagcgcgagatcgagcagctggtgggcgacgacccccagcgctgcgcctacttcgagatctcggccaagaagaacagcagcctggaccagatgttccgcgcgctcttcgccatggccaagctgcccagcgagatgagcccagacctgcaccgcaaggtctcggtgcagtactgcgacgtgctgcacaagaaggcgctgcggaacaagaagctgctgcgggccggcagcggcggcggcggcggcgacccgggcgacgcctttggcatcgtggcacccttcgcgcgccggcccagcgtacacagcgacctcatgtacatccgcgagaaggccagcgccggcagccaggccaaggacaaggagcgctgcgtcatcagctaggagccccgccgcgctggcgacacaacctaaggaggacctttttgttaagtcaaatccaacggcccggtgcgccccaggccgggagcgcgcgcggactggcgtctcccctcccggcgatccgcccccagcactggggaggcgccactgaaccgagaagggacggtcatctgctccggaaggaaagagaacgggccaagactgggactattccccacccccggtcccccattgaggcccgccacccccataactttgggagcgagggcccagccgagggtggatttatcttctcaaagacctaagagtgagcgcggggtgggggagggatgtgaagttatccagcctctgctaggcttcaagaaaccgtcatgcccgcttgagggtcaggacccacggggcattatcttgtctgtgattccgggttgctgtgacagccggtagagcctctgccctcccgaaactaagcgggggggcgtgggtcaaatcatagccaagtgacttgtttacatgtgagtgaaactgcacaaaggaacacaaaacaaaacttgcactttaacggtagttccggtgtcaacatggacacgaacaaaaccttacccaggtgtttatactgtgtgtgtgtgaggtctttaaagttattgctttatttggttttttaatatacaataaaataatttaaaatgg

SEQ ID NO: 88 - protein, 281 aa, Homo sapiens
MKLAAMIKKMCPSDSELSIPAKNCYRMVILGSSKVGKTAIVSRFLTGRFEDAYTPTIEDFHRKFYSIRGEVYQLDILDTSGNHPFPAMRRLSILTGDVFILVFSLDNRDSFEEVQRLRQQILDTKSCLKNKTKENVDVPLVICGNKGDRDFYREVDQREIEQLVGDDPQRCAYFEISAKKNSSLDQMFRALFAMAKLPSEMSPDLHRKVSVQYCDVLHKKALRNKKLLRAGSGGGGGDPGDAFGIVAPFARRPSVHSDLMYIREKASAGSQAKDKERCVIS

SEQ ID NO: 89 - DNA, 3974 bp, Homo sapiens
  CDS (178)..(3078)
aagtttgactgtgaacttccagatatttcattaaaagatttacagtttctgcaatcattttgtccttcggaagttcagccattcctcagggttcccttactttgtgactttgaacctctacaccagcatgtacttgctctacataatttggtaaaagcagcacaaagtttggatgaaatgtcacagaccattacagatctactgagtgaacaaaaggcatctgtgagtcagacatccccacagtctgcttcttcaccaaggatggaaagtacagcaggaattacaactactacctcaccgagaactcctccaccactgactgttcaggatcccttatgtcctgcagtttgtcccttagaagaattatctccagatagtattgatgcacatacgtttgattttgaaactattccccatccaaacatagaacagactattcaccaagtttctttagacttggattcattagcagaaagtcctgaatcagattttatgtctgctgtgaatgagtttgtaatagaagaaaatttgtcgtctcctaatcctataagtgatccacaaagcccagaaatgatggtggaatcactttattcatcagttatcaatgcgatagacagtagacgaatgcaggatacaaatgtatgtggtaaggaggattttggagatcatacttctctgaatgtccagttggaaagatgtagagttgttgcccaagactctcacttcagtatacaaaccattaaggaagacctttgccactttagaacatttgtacaaaaagaacagtgtgacttctcaaattcattaaaatgtacagcagtagaaataagaaacattattgaaaaagtaaaatgttctctggaaataacactaaaagaaaaacatcaaaaagaactactgtctttaaaaaatgaatatgaaggtaaacttgacggactaataaaggaaactgaagagaatgaaaacaaaattaaaaaattgaagggagagttagtatgccttgaggaggttttacaaaataaagataatgaatttgctttggttaaacatgaaaaagaagctgtaatctgcctgcagaatgaaaaggatcagaagttgttagagatggaaaatataatgcactctcaaaattgtgaaattaaagaactgaagcagtcacgagaaatagtgttagaagacttaaaaaagctccatgttgaaaatgatgagaagttacagttattgagggcagaacttcagtccttggagcaaagtcatctaaaggaattagaggacacacttcaggttaggcacatacaagagtttgagaaggttatgacagaccacagagtttctttggaggaattaaaaaaggaaaaccaacaaataattaatcaaatacaagaatctcatgctgaaattatccaggaaaaagaaaaacagttacaggaattaaaactcaaggtttctgatttgtcagacacgagatgcaagttagaggttgaacttgcgttgaaggaagcagaaactgatgaaataaaaattttgctggaagaaagcagagcccagcagaaggagaccttgaaatctcttcttgaacaagagacagaaaatttgagaacagaaattagtaaactcaaccaaaagattcaggataataatgaaaattatcaggtgggcttagcagagctaagaactttaatgacaattgaaaaagatcagtgtatttccgagttaattagtagacatgaagaagaatctaatatacttaaagctgaattaaacaaagtaacatctttgcataaccaagcatttgaaatagaaaaaaacctaaaagaacaaataattgaactgcagagtaaattggattcagaattgagtgctcttgaaagacaaaaagatgaaaaaattacccaacaagaagagaaatacgaagctattatccagaaccttgagaaagacagacaaaaattggtcagcagccaggagcaagacagagaacagttaattcagaagcttaattgtgaaaaagatgaagctattcagactgccctaaaagaatttaaattggagagagaagttgttgagaaagagttattagaaaaagttaaacatcttgagaatcaaatagcaaaaagtcctgccattgactctaccagaggagattcttcaagcttagttgctgaacttcaagaaaagcttcaggaagaaaaagctaagtttctagaacaacttgaagagcaagaaaaaagaaagaatgaagaaatgcaaaatgttcgaacatctttgattgcggaacaacagaccaattttaacactgttttaacaagagagaaaatgagaaaagaaaacataataaatgatcttagtgataagttgaaaagtacaatgcagcaacaagaacgggataaagatttgatagagtcactttctgaagatcgagctcgtttgcttgaggaaaagaaaaagcttgaagaagaagtcagtaagttgcgtagtagcagttttgttccttcaccatatgtagctacagccccagaactttatggagcttgtgcacctgaactcccaggtgaatcagatagatccgctgtggaaacagcagatgaaggaagagtggattcagcaatggagacaagcatgatgtctgtacaagaaaatattcatatgttgtctgaagaaaaacagcggataatgctgttagaacgaacattgcaattgaaagaagaagaaaataaacggttaaatcaaagactgatgtctcagagcatgtcttcagtatcttcaaggcattctgaaaagatagctattagagattttcaggtgggagatttggtactcatcatcctagacgaacgccatgacaattatgtgttatttactgttagtcctactttatattttctacattcagagtctctacctgccctggatctcaaaccaggtgagggtgcttcaggtgcatctagaagaccctgggtacttggaaaagtaatggaaaaagaatactgtcaagccaaaaaggcacaaaacagatttaaagttcctttggggacaaagttttacagagtgaaagccgtatcatggaataagaaagtataacttatggacaaaattaatacattctatgacatttttttctgatttgtcctgcagtgctcattcatcactccaaaaacagcaggccatctttttatgcaaaagtcagcgtgacaatatacttcactggtgtacatcgtttactttttaactggcttcattttaggaataataaattcatcagaatccttggctgaattaaaatggtttttgttttttggtttttttttttacccagacaactctagaaatgcggaccaaactacttcattttctcaaagggcataccttgtgcattgtggcttatgatgagccatattaattgcctgttaaatatacactagcttgaacttagatgttaaatgttattattaccagcatttgtccttttgtgaaatcagtatcagaatacttgcactctttaacacattctttataaaatgtataaattattcagaactatttaaaataaagaggagtgttattgcatgctgataatcattttgagtttgcctcagtagatactaaagcaaattgtttcagtttttttaaatgccctttgatgtttcaaaaaaaaaaaaggaactgtaatttgattgactgattttaagatcagccataagtaatcagcaatcttcaaaagcactttcagtggattggtcatctgggttctaaagggaagagtctgtgctactaaccatttcaaatgcagactcaaaccttcccaacatctttatgactctagaataatcatattgatgaaatcgtaattcatggttgagtttcagaacaaaagatattcattgcacattaaccatttagaggtcatttaaataacaaaatattgtattgtaaaagaactgtacaattttaaaacaataaagatttgaacctgt

SEQ ID NO: 90 - protein, 967 aa, Homo sapiens [sequence omitted]

SEQ ID NO: 91 - DNA, 6614 bp, Homo sapiens
  CDS (516)..(5288)
aacaaaccaagccgcggcggtgtccgcggccctgccgagccctcggcgttgcctcagaatcccccagtcgcctgggcccctcggctctgacaggccgcggccttctgtcccccggccccagacccagagccgaggggcctgctcgcgtccttgtccgcccggacccctccctgcctcctagagttcggggccgcggcgggcgggcgcccgggacgccggcggttgtgtcggcttagcggtgccgaatgggcggttggtaaccgctgccgaggactaggcggcggcggaagatggtgccgggggtcgctggctctgctgctgccgccggcgaaggaggaggcgttgccggttttctgagtttaaccagtaatgccattcagttgccaatctcaagcaaagcaaacataagccagttttaatctactttttaagaaaagtggtagtccttttcacagtgcctgacgtaactgtatcagagggtgaggtataagctcacagaattcagataaatcatcatgaagttatatgtatttctggttaacactggaactactctaacatttgacactgaacttacagtgcaaactgtggcagaccttaagcatgccattcaaagcaaatacaagattgctattcaacaccaggtgctggtggtcaatggaggagaatgcatggctgcagatcgaagagtgtgtacctacagtgctgggacggatacaaatccaatttttctttttaacaaagaaatgatcttatgtgatcgtccacctgctattcctaaaactaccttttcgacagaaaatgacatggaaataaaagttgaagaatctcttatgatgcctgcagtttttcatactgttgcttcaaggacacagcttgcattggaaatgtatgaagttgccaagaaactttgttctttttgtgaaggtcttgtacatgatgaacatcttcaacaccaaggctgggctgcaatcatggccaacctggaggactgttcaaattcataccaaaagctacttttcaagtttgaaagtatttattcaaattatctgcagtccatagaagacatcaagttaaaacttactcatttaggaactgcagtttcagtaatggccaagattccactgttggagtgcctaaccagacatagttacagagaatgtttgggaagactggattctttacctgaacatgaagactcagaaaaagctgagacgaaaagatccactgaactggtgctctctcctgatatgcctagaacaactaacgaatctttgttaacctcatttcccaagtcagtggaacatgtgtccccagataccgcagatgctgaaagtggcaaagaaattagggaatcttgtcaaagtactgttcatcagcaagatgaaactacgattgacactaaagatggtgatctgcccttttttaatgtctctttgttagactggataaatgttcaagatagacctaatgatgtggaatctttggtcaggaagtgctttgattctatgagcaggcttgatccaaggattattcgaccatttatagcagaatgccgtcaaactattgccaaacttgataatcagaatatgaaagccattaaaggacttgaagatcggctctacgccctggaccagatgattgctagctgtggccgactggtgaatgaacagaaagagcttgctcagggatttttagctaatcagaagagagctgaaaacttaaaggatgcatctgtattacctgatttatgcctgagtcacgcaaatcagttgatgattatgttgcaaaatcatagaaaactgttagatattaagcagaagtgtaccactgccaaacaagaactagcaaataacctacatgtcagactgaagtggtgttgctttgtaatgcttcatgctgatcaagatggagagaagttacaagctttgctccgcctcgtaatagagctgttagaaagagtcaaaattgttgaagctcttagtacagttcctcagatgtactgcttagctgttgttgaggttgtaagaagaaaaatgttcataaaacactacagggagtgggctggtgctttagtcaaagatggaaagagattatatgaagcagaaaaatcaaaaagggaatcctttgggaaattatttaggaagtcttttttaagaaatcgtctgtttaggggactggactcctggcccccttccttttgtactcaaaagcctcgaaagtttgactgtgaacttccagatatttcattaaaagatttacagtttctgcaatcattttgtccttcggaagttcagccattcctcagggttcccttactttgtgactttgaacctctacaccagcatgtacttgctctacataatttggtaaaagcagcacaaagtttggatgaaatgtcacagaccattacagatctactgagtgaacaaaaggcatctgtgagtcagacatccccacagtctgcttcttcaccaaggatggaaagtacagcaggaattacaactactacctcaccgagaactcctccaccactgactgttcaggatcccttatgtcctgcagtttgtcccttagaagaattatctccagatagtattgatgcacatacgtttgattttgaaactattccccatccaaacatagaacagactattcaccaagtttctttagacttggattcattagcagaaagtcctgaatcagattttatgtctgctgtgaatgagtttgtaatagaagaaaatttgtcgtctcctaatcctataagtgatccacaaagcccagaaatgatggtggaatcactttattcatcagttatcaatgcgatagacagtagacgaatgcaggatacaaatgtatgtggtaaggaggattttggagatcatacttctctgaatgtccagttggaaagatgtagagttgttgcccaagactctcacttcagtatacaaaccattaaggaagacctttgccactttagaacatttgtacaaaaagaacagtgtgacttctcaaattcattaaaatgtacagcagtagaaataagaaacattattgaaaaagtaaaatgttctctggaaataacactaaaagaaaaacatcaaaaagaactactgtctttaaaaaatgaatatgaaggtaaacttgacggactaataaaggaaactgaagagaatgaaaacaaaattaaaaaattgaagggagagttagtatgccttgaggaggttttacaaaataaagataatgaatttgctttggttaaacatgaaaaagaagctgtaatctgcctgcagaatgaaaaggatcagaagttgttagagatggaaaatataatgcactctcaaaattgtgaaattaaagaactgaagcagtcacgagaaatagtgttagaagacttaaaaaagctccatgttgaaaatgatgagaagttacagttattgagggcagaacttcagtccttggagcaaagtcatctaaaggaattagaggacacacttcaggttaggcacatacaagagtttgagaaggttatgacagaccacagagtttctttggaggaattaaaaaaggaaaaccaacaaataattaatcaaatacaagaatctcatgctgaaattatccaggaaaaagaaaaacagttacaggaattaaaactcaaggtttctgatttgtcagacacgagatgcaagttagaggttgaacttgcgttgaaggaagcagaaactgatgaaataaaaattttgctggaagaaagcagagcccagcagaaggagaccttgaaatctcttcttgaacaagagacagaaaatttgagaacagaaattagtaaactcaaccaaaagattcaggataataatgaaaattatcaggtgggcttagcagagctaagaactttaatgacaattgaaaaagatcagtgtatttccgagttaattagtagacatgaagaagaatctaatatacttaaagctgaattaaacaaagtaacatctttgcataaccaagcatttgaaatagaaaaaaacctaaaagaacaaataattgaactgcagagtaaattggattcagaattgagtgctcttgaaagacaaaaagatgaaaaaattacccaacaagaagagaaatacgaagctattatccagaaccttgagaaagacagacaaaaattggtcagcagccaggagcaagacagagaacagttaattcagaagcttaattgtgaaaaagatgaagctattcagactgccctaaaagaatttaaattggagagagaagttgttgagaaagagttattagaaaaagttaaacatcttgagaatcaaatagcaaaaagtcctgccattgactctaccagaggagattcttcaagcttagttgctgaacttcaagaaaagcttcaggaagaaaaagctaagtttctagaacaacttgaagagcaagaaaaaagaaagaatgaagaaatgcaaaatgttcgaacatctttgattgcggaacaacagaccaattttaacactgttttaacaagagagaaaatgagaaaagaaaacataataaatgatcttagtgataagttgaaaagtacaatgcagcaacaagaacgggataaagatttgatagagtcactttctgaagatcgagctcgtttgcttgaggaaaagaaaaagcttgaagaagaagtcagtaagttgcgcagtagcagttttgttccttcaccatatgtagctacagccccagaactttatggagcttgtgcacctgaactcccaggtgaatcagatagatccgctgtggaaacagcagatgaaggaagagtggattcagcaatggagacaagcatgatgtctgtacaagaaaatattcatatgttgtctgaagaaaaacagcggataatgctgttagaacgaacattgcaattgaaagaagaagaaaataaacggttaaatcaaagactgatgtctcagagcatgtcttcagtatcttcaaggcattctgaaaagatagctattagagattttcaggtgggagatttggtactcatcatcctagacgaacgccatgacaattatgtgttatttactgttagtcctactttatattttctacattcagagtctctacctgccctggatctcaaaccagcttcaggtgcatctagaagaccctgggtactcggaaaagtaatggaaaaagaatactgtcaagccaaaaaggcacaaaacagatttaaagttcctttggggacaaagttttacagagtgaaagccgtatcatggaataagaaagtataacttatggacaaaattaatacattctatgacatttttttctgatttgtcctgcagtgctcattcatcactccaaaaacagcaggccatctttttatgcaaaagtcagcgtgacaatatacttcactggtgtacatcgtttactttttaactggcttcattttaggaataataaattcatcagaatccttggctgaattaaaatggtttttgttttttggtttttttttttacccagacaactctagaaatgcggaccaaactacttcattttctcaaagggcataccttgtgcattgtggcttatgatgagccatattaattgcctgttaaatatacactagcttgaacttagatgttaaatgttattattaccagcatttgtccttttgtgaaatcagtatcagaatacttgcactctttaacacattctttataaaatgtataaattattcagaactatttaaaataaagaggagtgttattgcatgctgataatcattttgagtttgcctcagtagatactaaagcaaattgtttcagtttttttaaatgccctttgatgtttcaaaaaaaaaaaggaactgtaatttgattgactgattttaagatcagccataagtaatcagcaatcttcaaaagcactttcagtggattggtcatctgggttctaaagggaagagtctgtgctactaaccatttcaaatgcagactcaaaccttcccaacatctttatgactctagaataatcatattgatgaaatcgtaattcatggttgagtttcagaacaaaagatattcattgcacattaaccatttagaggtcatttaaataacaaaatattgtattgtaaaagaactgtacaattttaaaacaataaagatttgaacctgtaaatgtgtgtgccttttaaagaaggatacatttttaatatatttgagtgattgctgggaagtgtgaaaatattgttatgtatcatatcaaagagaaacatgtttattacaaaaatgttctttaactatatactatgtaacagggtaaacagtgttatgtagaatagaattgtgtaaactagatctttagagaagttgccattgagcaaagttatttaaatgagttagttgagttggatgagaattgtttgaggtttgttgctagagaacaataataaaataattctttttcagaaaatatttaatttcttcataaaaataagttaaatatttttttaaatatgtatatctaatagtacaaaatggaataaacatcatagtgtatagaaaactgaatttgacaagttaatgaataaatgaacaaatgatttc

SEQ ID NO: 92 - protein, 1591 aa, Homo sapiens
MKLYVFLVNTGTTLTFDTELTVQTVADLKHAIQSKYKIAIQHQVLVVNGGECMAADRRVCTYSAGTDTNPIFLFNKEMILCDRPPAIPKTTFSTENDMEIKVEESLMMPAVFHTVASRTQLALEMYEVAKKLCSFCEGLVHDEHLQHQGWAAIMANLEDCSNSYQKLLFKFESIYSNYLQSIEDIKLKLTHLGTAVSVMAKIPLLECLTRHSYRECLGRLDSLPEHEDSEKAETKRSTELVLSPDMPRTTNESLLTSFPKSVEHVSPDTADAESGKEIRESCQSTVHQQDETTIDTKDGDLPFFNVSLLDWINVQDRPNDVESLVRKCFDSMSRLDPRIIRPFIAECRQTIAKLDNQNMKAIKGLEDRLYALDQMIASCGRLVNEQKELAQGFLANQKRAENLKDASVLPDLCLSHANQLMIMLQNHRKLLDIKQKCTTAKQELANNLHVRLKWCCFVMLHADQDGEKLQALLRLVIELLERVKIVEALSTVPQMYCLAVVEVVRRKMFIKHYREWAGALVKDGKRLYEAEKSKRESFGKLFRKSFLRNRLFRGLDSWPPSFCTQKPRKFDCELPDISLKDLQFLQSFCPSEVQPFLRVPLLCDFEPLHQHVLALHNLVKAAQSLDEMSQTITDLLSEQKASVSQTSPQSASSPRMESTAGITTTTSPRTPPPLTVQDPLCPAVCPLEELSPDSIDAHTFDFETIPHPNIEQTIHQVSLDLDSLAESPESDFMSAVNEFVIEENLSSPNPISDPQSPEMMVESLYSSVINAIDSRRMQDTNVCGKEDFGDHTSLNVQLERCRVVAQDSHFSIQTIKEDLCHFRTFVQKEQCDFSNSLKCTAVEIRNIIEKVKCSLEITLKEKHQKELLSLKNEYEGKLDGLIKETEENENKIKKLKGELVCLEEVLQNKDNEFALVKHEKEAVICLQNEKDQKLLEMENIMHSQNCEIKELKQSREIVLEDLKKLHVENDEKLQLLRAELQSLEQSHLKELEDTLQVRHIQEFEKVMTDHRVSLEELKKENQQIINQIQESHAEIIQEKEKQLQELKLKVSDLSDTRCKLEVELALKEAETDEIKILLEESRAQQKETLKSLLEQETENLRTEISKLNQKIQDNNENYQVGLAELRTLMTIEKDQCISELISRHEEESNILKAELNKVTSLHNQAFEIEKNLKEQIIELQSKLDSELSALERQKDEKITQQEEKYEAIIQNLEKDRQKLVSSQEQDREQLIQKLNCEKDEAIQTALKEFKLEREVVEKELLEKVKHLENQIAKSPAIDSTRGDSSSLVAELQEKLQEEKAKFLEQLEEQEKRKNEEMQNVRTSLIAEQQTNFNTVLTREKMRKENIINDLSDKLKSTMQQQERDKDLIESLSEDRARLLEEKKKLEEEVSKLRSSSFVPSPYVATAPELYGACAPELPGESDRSAVETADEGRVDSAMETSMMSVQENIHMLSEEKQRIMLLERTLQLKEEENKRLNQRLMSQSMSSVSSRHSEKIAIRDFQVGDLVLIILDERHDNYVLFTVSPTLYFLHSESLPALDLKPASGASRRPWVLGKVMEKEYCQAKKAQNRFKVPLGTKFYRVKAVSWNKKV

SEQ ID NO: 93 - DNA, 3419 bp, Homo sapiens
  CDS (54)..(2906)
gtgccttctgtagtgtgaagaaactgaaaatagagccgagttccaactgggacatgactgggtacggctcccacagcaaagtgtatagccagagcaagaacatccccctgtcgcagccagccaccacaaccgtcagcacctccttgccggtcccaaacccaagcctaccttacgagcagaccatcgtcttcccaggaagcaccgggcacatcgtggtcacctcagcaagcagcacttctgtcaccgggcaagtcctcggcggaccacacaacctaatgcgtcgaagcactgtgagcctccttgatacctaccaaaaatgtggactcaagcgtaagagcgaggagatcgagaacacaagcagcgtgcagatcatcgaggagcatccacccatgattcagaataatgcaagcggggccactgtcgccactgccaccacgtctactgccacctccaaaaacagcggctccaacagcgagggcgactatcagctggtgcagcatgaggtgctgtgctccatgaccaacacctacgaggtcttagagttcttgggccgagggacgtttgggcaagtggtcaagtgctggaaacggggcaccaatgagatcgtagccatcaagatcctgaagaaccacccatcctatgcccgacaaggtcagattgaagtgagcatcctggcccggttgagcacggagagtgccgatgactataacttcgtccgggcctacgaatgcttccagcacaagaaccacacgtgcttggtcttcgagatgttggagcagaacctctatgactttctgaagcaaaacaagtttagccccttgcccctcaaatacattcgcccagttctccagcaggtagccacagccctgatgaaactcaaaagcctaggtcttatccacgctgacctcaaaccagaaaacatcatgctggtggatccatctagacaaccatacagagtcaaggtcatcgactttggttcagccagccacgtctccaaggctgtgtgctccacctacttgcagtccagatattacagggcccctgagatcatccttggtttaccattttgtgaggcaattgacatgtggtccctgggctgtgttattgcagaattgttcctgggttggccgttatatccaggagcttcggagtatgatcagattcggtatatttcacaaacacagggtttgcctgctgaatatttattaagcgccgggacaaagacaactaggtttttcaaccgtgacacggactcaccatatcctttgtggagactgaagacaccagatgaccatgaagcagagacagggattaagtcaaaagaagcaagaaagtacattttcaactgtttagatgatatggcccaggtgaacatgacgacagatttggaagggagcgacatgttggtagaaaaggctgaccggcgggagttcattgacctgttgaagaagatgctgaccattgatgctgacaagagaatcactccaatcgaaaccctgaaccatccctttgtcaccatgacacacttactcgattttccccacagcacacacgtcaaatcatgtttccagaacatggagatctgcaagcgtcgggtgaatatgtatgacacggtgaaccagagcaaaacccctttcatcacgcacgtggcccccagcacgtccaccaacctgaccatgacctttaacaaccagctgaccactgtccacaaccagccctcagcggcatccatggctgcagtggcccagcggagcatgcccctgcagacaggaacagcccagatttgtgcccggcctgacccgttccagcaagctctcatcgtgtgtccccccggcttccaaggcttgcaggcctctccctctaagcacgctggctactcggtgcgaatggaaaatgcagttcccatcgtcactcaagccccaggagctcagcctcttcagatccaaccaggtctgcttgcccagcaggcttggccaagtgggacccagcagatcctgcttcccccagcatggcagcaactgactggagtggccacccacacatcagtgcagcatgccaccgtgattcccgagaccatggcaggcacccagcagctggcggactggagaaatacgcatgctcacggaagccattataatcccatcatgcagcagcctgcactattgaccggtcatgtgacccttccagcagcacagcccttaaatgtgggtgtggcccacgtgatgcggcagcagccaaccagcaccacctcctcccggaagagtaagcagcaccagtcatctgtgagaaatgtctccacctgtgaggtgtcctcctctcaggccatcagctccccacagcgatccaagcgtgtcaaggagaacacacctccccgctgtgccatggtgcacagtagcccggcctgcagcacctcggtcacctgtgggtggggcgacgtggcctccagcaccacccgggaacggcagcggcagacaattgtcattcccgacactcccagccccacggtcagcgtcatcaccatcagcagtgacacggacgaggaggaggaacagaaacacgcccccaccagcactgtctccaagcaaagaaaaaacgtcatcagctgtgtcacagtccacgactccccctactccgactcctccagcaacaccagcccctactccgtgcagcagcgtgctgggcacaacaatgccaatgcctttgacaccaaggggagcctggagaatcactgcacggggaacccccgaaccatcatcgtgccacccctgaaaacccaggccagcgaagtattggtggagtgtgatagcctggtgccaggtaatttggggccaggacagggcaggaacctctccctggagagtggttttcctgcttttctgctgctggaaatgttgctgtatgggagctagtacaatagaaagtgcccagtgactgcaggcgacccttaccgaggattctattcaagtatccaggggaggcttctgctgaacagcacattgtataagcagcgttttccttctttaatcctgtaatcaatacctctctgcctttacaatggctctgcttccaactaggttgattaatagaaaataaaagcctcctggttctttatgcctgagcctggaagaatacctggtctggggagttcctggctgacatctagcaccactctctgccaggaagccctggtggtcagatgggcttcttgtgtaggaagaacctcctccgagtcttgctagggaagggtgaaattggcccctctcagcccctcctcggaatcagctgctgggcggcgagaccaagccatgtgtgtttctctgctcatgcactgctatcttcagaggactcctcctgtcccgcgaaggcttgtcttgaaaattgggccctggaataaaggctgagaacgtaaccttctgaat

SEQ ID NO: 94 - protein, 951 aa, Homo sapiens
MTGYGSHSKVYSQSKNIPLSQPATTTVSTSLPVPNPSLPYEQTIVFPGSTGHIVVTSASSTSVTGQVLGGPHNLMRRSTVSLLDTYQKCGLKRKSEEIENTSSVQIIEEHPPMIQNNASGATVATATTSTATSKNSGSNSEGDYQLVQHEVLCSMTNTYEVLEFLGRGTFGQVVKCWKRGTNEIVAIKILKNHPSYARQGQIEVSILARLSTESADDYNFVRAYECFQHKNHTCLVFEMLEQNLYDFLKQNKFSPLPLKYIRPVLQQVATALMKLKSLGLIHADLKPENIMLVDPSRQPYRVKVIDFGSASHVSKAVCSTYLQSRYYRAPEIILGLPFCEAIDMWSLGCVIAELFLGWPLYPGASEYDQIRYISQTQGLPAEYLLSAGTKTTRFFNRDTDSPYPLWRLKTPDDHEAETGIKSKEARKYIFNCLDDMAQVNMTTDLEGSDMLVEKADRREFIDLLKKMLTIDADKRITPIETLNHPFVTMTHLLDFPHSTHVKSCFQNMEICKRRVNMYDTVNQSKTPFITHVAPSTSTNLTMTFNNQLTTVHNQPSAASMAAVAQRSMPLQTGTAQICARPDPFQQALIVCPPGFQGLQASPSKHAGYSVRMENAVPIVTQAPGAQPLQIQPGLLAQQAWPSGTQQILLPPAWQQLTGVATHTSVQHATVIPETMAGTQQLADWRNTHAHGSHYNPIMQQPALLTGHVTLPAAQPLNVGVAHVMRQQPTSTTSSRKSKQHQSSVRNVSTCEVSSSQAISSPQRSKRVKENTPPRCAMVHSSPACSTSVTCGWGDVASSTTRERQRQTIVIPDTPSPTVSVITISSDTDEEEEQKHAPTSTVSKQRKNVISCVTVHDSPYSDSSSNTSPYSVQQRAGHNNANAFDTKGSLENHCTGNPRTIIVPPLKTQASEVLVECDSLVPGNLGPGQGRNLSLESGFPAFLLLEMLLYGS

SEQ ID NO: 95 - DNA, 3960 bp, Homo sapiens
  CDS (156)..(3668)
cacgggaggcggtgatgcgggcgcgggcggcctcggctgcgccgagagcggagacacaggctcaagatggcagattccgactgaggctgggggggccgagctcgcgcgccgctttcccgtccccgttgccatgaaccgcggacaccccggccccgatggcccccgtgtacgaaggtatggcctcacatgtgcaagttttctcccctcacacccttcaatcaagtgccttctgtagtgtgaagaaactgaaaatagagccgagttccaactgggacatgactgggtacggctcccacagcaaagtgtatagccagagcaagaacatccccctgtcgcagccagccaccacaaccgtcagcacctccttgccggtcccaaacccaagcctaccttacgagcagaccatcgtcttcccaggaagcaccgggcacatcgtggtcacctcagcaagcagcacttctgtcaccgggcaagtcctcggcggaccacacaacctaatgcgtcgaagcactgtgagcctccttgatacctaccaaaaatgtggactcaagcgtaagagcgaggagatcgagaacacaagcagcgtgcagatcatcgaggagcatccacccatgattcagaataatgcaagcggggccactgtcgccactgccaccacgtctactgccacctccaaaaacagcggctccaacagcgagggcgactatcagctggtgcagcatgaggtgctgtgctccatgaccaacacctacgaggtcttagagttcttgggccgagggacgtttgggcaagtggtcaagtgctggaaacggggcaccaatgagatcgtagccatcaagatcctgaagaaccacccatcctatgcccgacaaggtcagattgaagtgagcatcctggcccggttgagcacggagagtgccgatgactataacttcgtccgggcctacgaatgcttccagcacaagaaccacacgtgcttggtcttcgagatgttggagcagaacctctatgactttctgaagcaaaacaagtttagccccttgcccctcaaatacattcgcccagttctccagcaggtagccacagccctgatgaaactcaaaagcctaggtcttatccacgctgacctcaaaccagaaaacatcatgctggtggatccatctagacaaccatacagagtcaaggtcatcgactttggttcagccagccacgtctccaaggctgtgtgctccacctacttgcagtccagatattacagggcccctgagatcatccttggtttaccattttgtgaggcaattgacatgtggtccctgggctgtgttattgcagaattgttcctgggttggccgttatatccaggagcttcggagtatgatcagattcggtatatttcacaaacacagggtttgcctgctgaatatttattaagcgccgggacaaagacaactaggtttttcaaccgtgacacggactcaccatatcctttgtggagactgaagacaccagatgaccatgaagcagagacagggattaagtcaaaagaagcaagaaagtacattttcatctgtttagatgatatggcccaggtgaacatgacgacagatttggaagggagcgacatgttggtagaaaaggctgaccggcgggagttcattgacctgttgaagaagatgctgaccattgatgctgacaagagaatcactccaatcgaaaccctgaaccatccctttgtcaccatgacacacttactcgattttccccacagcacacacgtcaaatcatgtttccagaacatggagatctgcaagcgtcgggtgaatatgtatgacacggtgaaccagagcaaaacccctttcatcacgcacgtggcccccagcacgtccaccaacctgaccatgacctttaacaaccagctgaccactgtccacaaccagccctcagcggcatccatggctgcagtggcccagcggagcatgcccctgcagacaggaacagcccagatttgtgcccggcctgacccgttccagcaagctctcatcgtgtgtccccccggcttccaaggcttgcaggcctctccctctaagcacgctggctactcggtgcgaatggaaaatgcagttcccatcgtcactcaagccccaggagctcagcctcttcagatccaaccaggtctgcttgcccagcaggcttggccaagtgggacccagcagatcctgcttcccccagcatggcagcaactgactggagtggccacccacacatcagtgcagcatgccaccgtgattcccgagaccatggcaggcacccagcagctggcggactggagaaatacgcatgctcacggaagccattataatcccatcatgcagcagcctgcactattgaccggtcatgtgacccttccagcagcacagcccttaaatgtgggtgtggcccacgtgatgcggcagcagccaaccagcaccacctcctcccggaagagtaagcagcaccagtcatctgtgagaaatgtctccacctgtgaggtgtcctcctctcaggccatcagctccccacagcgatccaagcgtgtcaaggagaacacacctccccgctgtgccatggtgcacagtagcccggcctgcagcacctcggtcacctgtgggtggggcgacgtggcctccagcaccacccgggaacggcagcggcagacaattgtcattcccgacactcccagccccacggtcagcgtcatcaccatcagcagtgacacggacgaggaggaggaacagaaacacgcccccaccagcactgtctccaagcaaagaaaaaacgtcatcagctgtgtcacagtccacgactccccctactccgactcctccagcaacaccagcccctactccgtgcagcagcgtgctgggcacaacaatgccaatgcctttgacaccaaggggagcctggagaatcactgcacggggaacccccgaaccatcatcgtgccacccctgaaaacccaggccagcgaagtattggtggagtgtgatagcctggtgccagtcaacaccagtcaccactcgtcctcctacaagtccaagtcctccagcaacgtgacctccaccagcggtcactcttcagggagctcatctggagccatcacctaccggcagcagcggccgggcccccacttccagcagcagcagccactcaatctcagccaggctcagcagcacatcaccacggaccgcactgggagccaccgaaggcagcaggcctacatcactcccaccatggcccaggctccgtactccttcccgcacaacagccccagccacggcactgtgcacccgcatctggctgcagccgctgccgctgcccacctccccacccagccccacctctacacctacactgcgccggcggccctgggctccaccggcaccgtggcccacctggtggcctcgcaaggctctgcgcgccacaccgtgcagcacactgcctacccagccagcatcgtccaccaggtccccgtgagcatgggcccccgggtcctgccctcgcccaccatccacccgagtcagtatccagcccaatttgcccaccagacctacatcagcgcctcgccagcctccaccgtctacactggatacccactgagccccgccaaggtcaaccagtacccttacatataaacactggaggggagggagggagggagggagggagagaatggcccgagggaggagggagagaaggagggaggcgctcctgggaccgtgggcgctggccttttatactgaagatgccgcacacaaacaatgcaaacggggcaggggcggggggggggggggcagagggcagggggacgggtcgggacaccagtgaaacttgaaccgggaagtgggaggacgtagagcagagaagagaacatttttaaaaggaagggattaaagagggtgggaaatctatggtttttatttt

SEQ ID NO: 96 - protein, 1171 aa, Homo sapiens [sequence omitted]

SEQ ID NO: 97 - DNA, 3994 bp, Homo sapiens
  CDS (109)..(3702)
cggccgcttttttctcaagatggcagattcccactgaggctgagggggccgagctcgcgcgccgcgttcccttctccgttgccatgaaccgcggacaccccggccccgatggcccccgtgtacgaaggtatggcctcacatgtgcaagttttctcccctcacacccttcaatcaagtgccttctgtagtgtgaagaaactaaaagtagagccaagttccaactgggacatgactgggtacggctcccacagcaaagtgtacagccagagcaagaacataccaccttctcagccagcctccacaaccgtcagcacctccttgccggtcccaaacccaagcctaccttacgagcagaccatcgtcttcccaggaagcaccgggcacatcgtggtcacctcagcaagcagcacttctgtcaccgggcaagtcctcggcggaccacacaacctaatgcgtcgaagcactgtgagcctccttgatacctaccaaaaatgtggactcaagcgtaagagcgaggagatcgagaacacaagcagcgtgcagatcatcgaggagcatccacccatgattcagaataatgcaagcggggccactgtcgccactgccaccacgtctactgccacctccaaaaacagcggctccaacagcgagggcgactatcagctggtgcagcatgaggtgctgtgctccatgaccaacacctacgaggtcttagagttcttgggccgagggacgtttggacaagtggtcaagtgctggaaacggggcaccaatgagatcgtagccatcaagatcctgaagaaccgcccatcctatgcccgacaaggtcagattgaagtgagcatcctggcccggttgagcacggagagtgccgatgactataacttcgtccgggcctacgaatgcttccagcacaagaaccacacgtgcttggtcttcgagatgttggagcagaacctctatgactttctgaagcaaaacaagtttagccccttgcccctcaaatacattcgcccagttctccagcaggtagccacagccctgatgaaactcaaaagcctaggtcttatccacgctgacctcaaaccagaaaacatcatgctggtggatccatctagacaaccatacagagtcaaggtcatcgactttggttcagccagccacgtctccaaggctgtgtgctccacctacttgcagtccagatattacagggcccctgagatcatccttggtttaccattttgtgaggcaattgacatgtggtccctgggctgtgttattgcagaattgttcctgggttggccgttatatccaggagcttcggagtatgatcagattcggtatatttcacaaacacagggtttgcctgctgaatatttattaagcgccgggacaaagacaactaggtttttcaaccgtgacacggactcaccatatcctttgtggagactgaagacaccagatgaccatgaagcagagacagggattaagtcaaaagaagcaagaaagtacattttcaactgtttagatgatatggcccaggtgaacatgacgacagatttggaagggagcgacatgttggtagaaaaggctgaccggcgggagttcattgacctgttgaagaagatgctgaccattgatgctgacaagagaatcactccaatcgaaaccctgaaccatccctttgtcaccatgacacacttactcgattttccccacagcacacacgtcaaatcatgtttccagaacatggagatctgcaagcgtcgggtgaatatgtatgacacggtgaaccagagcaaaacccctttcatcacgcacgtggcccccagcacgtccaccaacctgaccatgacctttaacaaccagctgaccactgtccacaaccaggctccctcctctaccagtgccactatttccttagccaatcccgaagtctccatactaaactacccatctacactctaccagccctcagcggcatccatggctgcagtggcccagcggagcatgcccctgcagacaggaacagcccagatttgtgcccggcctgacccgttccagcaagctctcatcgtgtgtccccccggcttccaaggcttgcaggcctctccctctaagcacgctggctactcggtgcgaatggaaaatgcagttcccatcgtcactcaagccccaggagctcagcctcttcagatccaaccaggtctgcttgcccagcaggcttggccaagtgggacccagcagatcctgcttcccccagcatggcagcaactgactggagtggccacccacacatcagtgcagcatgccaccgtgattcccgagaccatggcaggcacccagcagctggcggactggagaaatacgcatgctcacggaagccattataatcccatcatgcagcagcctgcactattgaccggtcatgtgacccttccagcagcacagcccttaaatgtgggtgtggcccacgtgatgcggcagcagccaaccagcaccacctcctcccggaagagtaagcagcaccagtcatctgtgagaaatgtctccacctgtgaggtgtcctcctctcaggccatcagctccccacagcgatccaagcgtgtcaaggagaacacacctccccgctgtgccatggtgcacagtagcccggcctgcagcacctcggtcacctgtgggtggggcgacgtggcctccagcaccacccgggaacggcagcggcagacaattgtcattcccgacactcccagccccacggtcagcgtcatcaccatcagcagtgacacggacgaggaggaggaacagaaacacgcccccaccagcactgtctccaagcaaagaaaaaacgtcatcagctgtgtcacagtccacgactccccctactccgactcctccagcaacaccagcccctactccgtgcagcagcgtgctgggcacaacaatgccaatgcctttgacaccaaggggagcctggagaatcactgcacggggaacccccgaaccatcatcgtgccacccctgaaaacccaggccagcgaagtattggtggagtgtgatagcctggtgccagtcaacaccagtcaccactcgtcctcctacaagtccaagtcctccagcaacgtgacctccaccagcggtcactcttcagggagctcatctggagccatcacctaccggcagcagcggccgggcccccacttccagcagcagcagccactcaatctcagccaggctcagcagcacatcaccacggaccgcactgggagccaccgaaggcagcaggcctacatcactcccaccatggcccaggctccgtactccttcccgcacaacagccccagccacggcactgtgcacccgcatctggctgcagccgctgccgctgcccacctccccacccagccccacctctacacctacactgcgccggcggccctgggctccaccggcaccgtggcccacctggtggcctcgcaaggctctgcgcgccacaccgtgcagcacactgcctacccagccagcatcgtccaccaggtccccgtgagcatgggcccccgggtcctgccctcgcccaccatccacccgagtcagtatccagcccaatttgcccaccagacctacatcagcgcctcgccagcctccaccgtctacactggatacccactgagccccgccaaggtcaaccagtacccttacatataaacactggaggggagggagggagggagggagggagagaatggcccgagggaggagggagagaaggagggaggcgctcctgggaccgtgggcgctggccttttatactgaagatgccgcacacaaacaatgcaaacggggcaggggcggggggggggggggcagagggcagggggacgggtcgggacaccagtgaaacttgaaccgggaagtgggaggacgtagagcagagaagagaacatttttaaaaggaagggattaaagagggtgggaaatctatggtttttatttt

SEQ ID NO: 98 - protein, 1198 aa, Homo sapiens
MAPVYEGMASHVQVFSPHTLQSSAFCSVKKLKVEPSSNWDMTGYGSHSKVYSQSKNIPPSQPASTTVSTSLPVPNPSLPYEQTIVFPGSTGHIVVTSASSTSVTGQVLGGPHNLMRRSTVSLLDTYQKCGLKRKSEEIENTSSVQIIEEHPPMIQNNASGATVATATTSTATSKNSGSNSEGDYQLVQHEVLCSMTNTYEVLEFLGRGTFGQVVKCWKRGTNEIVAIKILKNRPSYARQGQIEVSILARLSTESADDYNFVRAYECFQHKNHTCLVFEMLEQNLYDFLKQNKFSPLPLKYIRPVLQQVATALMKLKSLGLIHADLKPENIMLVDPSRQPYRVKVIDFGSASHVSKAVCSTYLQSRYYRAPEIILGLPFCEAIDMWSLGCVIAELFLGWPLYPGASEYDQIRYISQTQGLPAEYLLSAGTKTTRFFNRDTDSPYPLWRLKTPDDHEAETGIKSKEARKYIFNCLDDMAQVNMTTDLEGSDMLVEKADRREFIDLLKKMLTIDADKRITPIETLNHPFVTMTHLLDFPHSTHVKSCFQNMEICKRRVNMYDTVNQSKTPFITHVAPSTSTNLTMTFNNQLTTVHNQAPSSTSATISLANPEVSILNYPSTLYQPSAASMAAVAQRSMPLQTGTAQICARPDPFQQALIVCPPGFQGLQASPSKHAGYSVRMENAVPIVTQAPGAQPLQIQPGLLAQQAWPSGTQQILLPPAWQQLTGVATHTSVQHATVIPETMAGTQQLADWRNTHAHGSHYNPIMQQPALLTGHVTLPAAQPLNVGVAHVMRQQPTSTTSSRKSKQHQSSVRNVSTCEVSSSQAISSPQRSKRVKENTPPRCAMVHSSPACSTSVTCGWGDVASSTTRERQRQTIVIPDTPSPTVSVITISSDTDEEEEQKHAPTSTVSKQRKNVISCVTVHDSPYSDSSSNTSPYSVQQRAGHNNANAFDTKGSLENHCTGNPRTIIVPPLKTQASEVLVECDSLVPVNTSHHSSSYKSKSSSNVTSTSGHSSGSSSGAITYRQQRPGPHFQQQQPLNLSQAQQHITTDRTGSHRRQQAYITPTMAQAPYSFPHNSPSHGTVHPHLAAAAAAAHLPTQPHLYTYTAPAALGSTGTVAHLVASQGSARHTVQHTAYPASIVHQVPVSMGPRVLPSPTIHPSQYPAQFAHQTYISASPASTVYTGYPLSPAKVNQYPYI

SEQ ID NO: 99 - DNA, 2937 bp, Homo sapiens
  CDS (1)..(2733)
atggcctcacatgtgcaagttttctcccctcacacccttcaatcaagtgccttctgtagtgtgaagaaactgaaaatagagccgagttccaactgggacatgactgggtacggctcccacagcaaagtgtatagccagagcaagaacatccccctgtcgcagccagccaccacaaccgtcagcacctccttgccggtcccaaacccaagcctaccttacgagcagaccatcgtcttcccaggaagcaccgggcacatcgtggtcacctcagcaagcagcacttctgtcaccgggcaagtcctcggcggaccacacaacctaatgcgtcgaagcactgtgagcctccttgatacctaccaaaaatgtggactcaagcgtaagagcgaggagatcgagaacacaagcagcgtgcagatcatcgaggagcatccacccatgattcagaataatgcaagcggggccactgtcgccactgccaccacgtttactgccacctccaaaaacagcggctccaacagcgagggggactatcagctgtcgcagcatgaggtgctgtgctccatgaccaacacctacgaggtctcagagttcttgggccgagggacgtttgggcaagtggtcaagtgctggaaacggggcaccaatgagatcgtagccatcaagatcctgaagaaccacccatcctatgcccgacaaggtcagattgaagtgagcatcctggcccggttgagcacggagagtgccgatgactataacttcgtccgggcctacgaatgcttccagcacaagaaccacacgtgcttggtcttcgagatgttggagcagaacctctatgactttctgaagcaaaacaagtttagccccttgcccctcaaatacattcgcccagttctccagcaggtagccacagccctgatgaaactcaaaagcctaggtcttatccacgctgacctcaaaccagaaaacatcatgctggtggatccatctagacaaccatacagagtcaaggtcatcgactttggttcagccagccacgtctccaaggctgtgtgctccacctacttgcagtccagatattacagggcccctgagatcatccttggtttaccattttgtgaggcaattgacatgtggtccctgggttgtgttattgcagaattgttcctggggtggccgttatatccaggagcttcggagtatgatcagattcggtatatttcacaaacacagggtttgcctgctgaatatttattaagcgccgggacaaagacaactaggttttttaaccgtgacacggactcaccatatcctttgtggagactgaagacaccagatgaccatgaagcagagacagggattaagtcaaaagaagcaagaaagtacattttcaactgtttagatgatatggcccaggtgaacatgacgacagatttggaagggagcgacatgttggtagaaaaggctgaccggcgggagttcattgacctgttgaagaagatgctgaccattgatgctgacaagagaatcactccaatcgaaaccctgaaccatccctttgtcaccatgacacacttactcgattttccccacagcacacacgtcaaatcatgtttccagaacatggagatctgcaagcgtcgggtgaatatgtatgacacggtgaaccagagcaaaacccctttcatcacgcacgtggcccccagcacgtccaccaacctgaccatgacctttaacaaccagctgaccactgtccacaaccaggctccctcctctaccagtgccactatttccttagccaatcccgaagtctccatactaaactacccatctacactctaccagccctcagcggcatccatggctgcagtggcccagcggagcatgcccctgcagacaggaacagcccagatttgtgcccggcctgacccgttccagcaagctctcatcgtgtgtccccccggcttccaaggcttgcaggcctcttcctctaagcacgctggctactcggtgcgaatggaaaatgcagttcccatcgtcactcaagccccaggagctcagcctcttcagatccaaccaggtctgcttgcccagcaggcttggccaagtgggaaccaacagatcctgctttctcccacatggcagcaactggatggagtggccacccacacatcagtgcagcatgccaccgtgattcccgagaccatggcaggcacccagcagctggcggactggagaaatacgcatgctcacggaagccattataatcccatcatgcagcagcctgcactattgaccggtcatgtgacccttccagcagcacagcccttaaatgtgggtgtggcccacgtgatgcggcagcagccaaccagcaccacctcctcccggaagagtaagcagcatgtctccaagcaaagaaaaaacgtcatcagctgtgtcacagtccacgactccccctactccgactcctccagcaacaccagcccctactccgtgcagcagcgtgctgggcacaacaatgccaatgcctttgacaccaaggggagcctggagaatcactgcacggggaacccccgaaccatcatcgtgccacccctgaaaacccaggccagcgaagtattggtggagtgtgatagcctggtgccaggtaatttggggccaggacagggcaggaacctctccctggagagtggttttcctgcttttctgctgctagaaatgttgctgtatgggagctagtacaatagaaagtgcccagtgactgcaggcgacccttaccgaggattttattcaagtatccaggggaggcttctgctgaacagcacattgtataagcagcgttttccttctttaatcctgtaatcaatacctctctgcctttacaatggctctgcttccaactaggttgattaatagaaaataaaagcctcctggttcttt

SEQ ID NO: 100 - protein, 911 aa, Homo sapiens [sequence omitted]

SEQ ID NO: 101 - DNA, 4391 bp, Homo sapiens
  CDS (72)..(1961)
agctgcagcatcggagtgtggcagtgctgggctggccggcgggctgggctgcggcccgcgcgcggccggcgatgcaggggggcaactccggggtccgcaagcgcgaagaggagggcgacggggctggggctgtggctgcgccgccggccatcgactttcccgccgagggcccggaccccgaatatgacgaatctgatgttccagcagaaatccaggtgttaaaagaacccctacaacagccaaccttcccttttgcagttgcaaaccaactcttgctggtttctttgctggagcacttgagccacgtgcatgaaccaaacccacttcgttcaagacaggtgtttaagctactttgccagacgtttatcaaaatggggctgctgtcttctttcacttgtagtgacgagtttagctcattgagactacatcacaacagagctattactcacttaatgaggtctgctaaagagagagttcgtcaggatccttgtgaggatatttctcgtatccagaaaatcagatcaagggaagtagccttggaagcacaaacttcacgttacttaaatgaatttgaagaacttgccatcttaggaaaaggtggatacggaagagtatacaaggtcaggaataaattagatggtcagtattatgcaataaaaaaaatcctgattaagggtgcaactaaaacagtttgcatgaaggtcctacgggaagtgaaggtgctggcaggtcttcagcaccccaatattgttggctatcacaccgcgtggatagaacatgttcatgtgattcagccacgagcagacagagctgccattgagttgccatctctggaagtgctctccgaccaggaagaggacagagagcaatgtggtgttaaaaatgatgaaagtagcagctcatccattatctttgctgagcccaccccagaaaaagaaaaacgctttggagaatctgacactgaaaatcagaataacaagtcggtgaagtacaccaccaatttagtcataagagaatctggtgaacttgagtcgaccctggagctccaggaaaatggcttggctggtttgtctgccagttcaattgtggaacagcagctgccactcaggcgtaattcccacctagaggagagtttcacatccaccgaagaatcttccgaagaaaatgtcaactttttgggtcagacagaggcacagtaccacctgatgctgcacatccagatgcagctgtgtgagctctcgctgtgggattggatagtcgagagaaacaagcggggccgggagtatgtggacgagtctgcctgtccttatgttatggccaatgttgcaacaaaaatttttcaagaattggtagaaggtgtgttttacatacataacatgggaattgtgcaccgagatctgaagccaagaaatatttttcttcatggccctgatcagcaagtaaaaataggagactttggtctggcctgcacagacatcctacagaagaacacagactggaccaacagaaacgggaagagaacaccaacacatacgtccagagtgggtacttgtctgtacgcttcacccgaacagttggaaggatctgagtatgatgccaagtcagatatgtacagcttgggtgtggtcctgctagagctctttcagccgtttggaacagaaatggagcgagcagaagttctaacaggtttaagaactggtcagttgccggaatccctccgtaaaaggtgtccagtgcaagccaagtatatccagcacttaacgagaaggaactcatcgcagagaccatctgccattcagctgctgcagagtgaacttttccaaaattctggaaatgttaacctcaccctacagatgaagataatagagcaagaaaaagaaattgcagaactaaagaagcagctaaacctcctttctcaagacaaaggggtgagggatgacggaaaggatgggggcgtgggatgaaagtggacttaacttttaaggtagttaactggaatgtaaatttttaatctttattagggtatagttggtacaatgcttcgttgtatttagtaagcctttacaagacttgttaaagatgtcagagtgccccaagctgccgttccttcccttcctgccccacaagctccttttcctgaatttcctacctaaatattaaccatatgcctagtctctgaaactaaaaacttggacctcatcctcaattattttctcctttcaactctgttgaccctctgtctggtcttcctctagaaggttctaccgcagaaattgatgtgtgctccctgccctcgtcactgcccaagcccgggcctgcacatactcactggactgttccagttttgacagctgccagtcttcctgcccctttcacactgcagctgaagttcattacctgaaggacgcctcatcatttcattccttggctccaaaccttctgctgcctctaagataaaagctcaacttcttaacagtgtacagtgtgcaacttccaacctttttatctgttctctccaccttcagtttagcgtcattccaaaaccacacccttgcaaagctttgtactccgcaccccagatgatctccaggcagctcagatctctttcctgcctttgccctgcactgttccccggtacttcctcctttattgtagcactcagctccccagccaatctgtacatccctcagaggcagcgatctgatgaattggtttttgaatcccagaaagggtctgccatggagttggcagtcatcacggtagatggcgtatgattttgctgaattttaaataaaatgaaaaccataaattacatgatgcttttattgacacttgacaactggcctaaataaaaagactctgactctaatacaagtccccttactgataataggcatgaaagagcaccattcttaaaatctaaaccctttaaaatcagttacggcaattcacttaaggagcttgagggccgtgttaaaaggagccaggttttcacaagacctcatccacctctgcacattggctggcactgtcacactgcagcctccgatctgctggagtacagaccacagcaccacgtctgctacggtgagttcattcccagcgagccaagggctcttcccaagagcagagttcatggagcggaaaacagcggctttttctttactgcttccctcttttaactgaaaaatcgcaatatctacccagctatctataagggttgcgttgacagcattatgcttctggccaaacagagagaacaagaaacgtgcaatgttcccttcgccttcgatggggcacatcgtctggatgctgaatttcatctgcgtcttcggcactgaaaagaaaaaacacgccaggtagcatcaccagagcagccctgagggaagtactcgcacagtggggaaggggacagtcaccaaacaccacagactgatgacattggaaagggtgttttcaagaagaacatcacattttcagtctgtctctaagatgcttactactgaaaagggtttaagtgcaaactatgttaaaaaagtaaccaaagagtcattcctggtatttgattatgacacttctgaagctagaagggacctcagaccacctgctccaatccctgctgcctaaggttttgggggctgagggctggaaacccaggagctgcatctcccaggctcttggcctcataatcgccttctgtgagactgagggcaattaagatatgaatgacatgaactcgcttctttccatatcaacataaaccagaagaggcatacatctgtgggatagtcaatacataacatcctatctttatatggccatatgagaagataacttcagtgtccctatgatggtaagttcttgaatgtgagggcaagatggctgtgatagccatgactccccgctttgcctggttggacagaacccccttccccaaatgctcacagtcccccccttgagctgtgtctcactcagagaccctaaattttgcagacgaacaagggcatctttgcgttgcttcatctctgctcctcctctagaactatcccacaggctttctagacttagaatatctgacctgatgcaaatcgctatgtggccagtatgccacagaatgtcctaaacccttgctgcctcttatcaaaaccatgttgcacatctcatcatatagtacagctaacccttgaacagtgggggggttagggacactgacccccgactgctgtgcagtcgaaaatccacataaaacttctgactccttcaaaacttaagcactaatagcctactattcatgggaagccttacccatcacagttgattaacacgttttgtatggtctgtatattatatgctatattcttacaataaacttgagaaaatgttaagaaaat

SEQ ID NO: 102 - protein, 630 aa, Homo sapiens
MQGGNSGVRKREEEGDGAGAVAAPPAIDFPAEGPDPEYDESDVPAEIQVLKEPLQQPTFPFAVANQLLLVSLLEHLSHVHEPNPLRSRQVFKLLCQTFIKMGLLSSFTCSDEFSSLRLHHNRAITHLMRSAKERVRQDPCEDISRIQKIRSREVALEAQTSRYLNEFEELAILGKGGYGRVYKVRNKLDGQYYAIKKILIKGATKTVCMKVLREVKVLAGLQHPNIVGYHTAWIEHVHVIQPRADRAAIELPSLEVLSDQEEDREQCGVKNDESSSSSIIFAEPTPEKEKRFGESDTENQNNKSVKYTTNLVIRESGELESTLELQENGLAGLSASSIVEQQLPLRRNSHLEESFTSTEESSEENVNFLGQTEAQYHLMLHIQMQLCELSLWDWIVERNKRGREYVDESACPYVMANVATKIFQELVEGVFYIHNMGIVHRDLKPRNIFLHGPDQQVKIGDFGLACTDILQKNTDWTNRNGKRTPTHTSRVGTCLYASPEQLEGSEYDAKSDMYSLGVVLLELFQPFGTEMERAEVLTGLRTGQLPESLRKRCPVQAKYIQHLTRRNSSQRPSAIQLLQSELFQNSGNVNLTLQMKIIEQEKEIAELKKQLNLLSQDKGVRDDGKDGGVG

SEQ ID NO: 103 - DNA, 2844 bp, Homo sapiens
  CDS (52)..(1938)
gcagtgctgggctggccggcgggctgggctgcggcccgcgcgcggccggcgatgcaggggggcaactccggggtccgcaagcgcgaagaggagggcgacggggctggggctgtggctgcgccgccggccatcgactttcccgccgagggcccggaccccgaatatgacgaatctgatgttccagcagaaatccaggtgttaaaagaacccctacaacagccaaccttcccttttgcagttgcaaaccaactcttgctggtttctttgctggagcacttgagccacgtgcatgaaccaaacccacttcgttcaagacaggtgtttaagctactttgccagacgtttatcaaaatggggctgctgtcttctttcacttgtagtgacgagtttagctcattgagactacatcacaacagagctattactcacttaatgaggtctgctaaagagagagttcgtcaggatccttgtgaggatatttctcgtatccagaaaatcagatcaagggaagtagccttggaagcacaaacttcacgttacttaaatgaatttgaagaacttgccatcttaggaaaaggtggatacggaagagtatacaaggtcaggaataaattagatggtcagtattatgcaataaaaaaaatcctgattaagggtgcaactaaaacagtttgcatgaaggtcctacgggaagtgaaggtgctggcaggtcttcagcaccccaatattgttggctatcacaccgcgtggatagaacatgttcatgtgattcagccacgagacagagctgccattgagttgccatctctggaagtgctctccgaccaggaagaggacagagagcaatgtggtgttaaaaatgatgaaagtagcagctcatccattatctttgctgagcccaccccagaaaaagaaaaacgctttggagaatctgacactgaaaatcagaataacaagtcggtgaagtacaccaccaatttagtcataagagaatctggtgaacttgagtcgaccctggagctccaggaaaatggcttggctggtttgtctgccagttcaattgtggaacagcagctgccactcaggcgtaattcccacctagaggagagtttcacatccaccgaagaatcttccgaagaaaatgtcaactttttgggtcagacagaggcacagtaccacctgatgctgcacatccagatgcagctgtgtgagctctcgctgtgggattggatagtcgagagaaacaagcggggccgggagtatgtggacgagtctgcctgtccttatgttatggccaatgttgcaacaaaaatttttcaagaattggtagaaggtgtgttttacatacataacatgggaattgtgcaccgagatctgaagccaagaaatatttttcttcatggccctgatcagcaagtaaaaataggagactttggtctggcctgcacagacatcctacagaagaacacagactggaccaacagaaacgggaagagaacaccaacacatacgtccagagtgggtacttgtctgtacgcttcacccgaacagttggaaggatctgagtatgatgccaagtcagatatgtacagcttgggtgtggtcctgctagagctctttcagccgtttggaacagaaatggagcgagcagaagttctaacaggtttaagaactggtcagttgccggaatccctccgtaaaaggtgtccagtgcaagccaagtatatccagcacttaacgagaaggaactcatcgcagagaccatctgccattcagctgctgcagagtgaacttttccaaaattctggaaatgttaacctcaccctacagatgaagataatagagcaagaaaaagaaattgcagaactaaagaagcagctaaacctcctttctcaagacaaaggggtgagggatgacggaaaggatgggggcgtgggatgaaagtggacttaacttttaaggtagttaactggaatgtaaatttttaatctttattagggtatagttggtacaatgcttcgttgtatttagtaagcctttacaagacttgttaaagatgtcagagtgccccaagctgccgttccttcccttcctgccccacaagctccttttcctgaatttcctacctaaatattaaccatatgcctagtctctgaaactaaaaacttggacctcatcctcaattattttctcctttcaactctgttgaccctctgtctggtcttcctctagaaggttctaccgcagaaattgatgtgtgctccctgccctcgtcactgcccaagcccgggcctgcacatactcactggactgttccagttttgacagctgccagtcttcctgcccctttcacactgcagctgaagttcattacctgaaggacgcctcatcatttcattccttggctccaaaccttctgctgcctctaagataaaagctcaacttcttaacagtgtacagtgtgcaacttccaacctttttatctgttctctccaccttcagtttagcgtcattccaaaaccacacccttgcaaagctttgtactccgcaccccagatgatctccaggcagctcagatctctttcctgcctttgccctgcactgttccccggtacttcctcctttattgtagcactcagctccccagccaatctgtacatccctcagaggcagcgatctgatgaattggtttttgaatcccagaaagggtctgccatggagttggcagtcatcacggtagatggcgtatgattttgctgaattttaaataaaatgaaaaccataaattacatgatgcttttattgacacttgacaactggcctaaataaaaagactctgactcc

SEQ ID NO: 104 - protein, 629 aa, Homo sapiens
MQGGNSGVRKREEEGDGAGAVAAPPAIDFPAEGPDPEYDESDVPAEIQVLKEPLQQPTFPFAVANQLLLVSLLEHLSHVHEPNPLRSRQVFKLLCQTFIKMGLLSSFTCSDEFSSLRLHHNRAITHLMRSAKERVRQDPCEDISRIQKIRSREVALEAQTSRYLNEFEELAILGKGGYGRVYKVRNKLDGQYYAIKKILIKGATKTVCMKVLREVKVLAGLQHPNIVGYHTAWIEHVHVIQPRDRAAIELPSLEVLSDQEEDREQCGVKNDESSSSSIIFAEPTPEKEKRFGESDTENQNNKSVKYTTNLVIRESGELESTLELQENGLAGLSASSIVEQQLPLRRNSHLEESFTSTEESSEENVNFLGQTEAQYHLMLHIQMQLCELSLWDWIVERNKRGREYVDESACPYVMANVATKIFQELVEGVFYIHNMGIVHRDLKPRNIFLHGPDQQVKIGDFGLACTDILQKNTDWTNRNGKRTPTHTSRVGTCLYASPEQLEGSEYDAKSDMYSLGVVLLELFQPFGTEMERAEVLTGLRTGQLPESLRKRCPVQAKYIQHLTRRNSSQRPSAIQLLQSELFQNSGNVNLTLQMKIIEQEKEIAELKKQLNLLSQDKGVRDDGKDGGVG

SEQ ID NO: 105 - DNA, 2776 bp, Mus musculus
  CDS (90)..(1946)
gtgttacttccggcttggggggaggctctagtggccggcagcgtctggggaccggcagagcgaggttactatccacgctccgaacggcaatgctggggggcagctccgtggacggcgagcgcgacacggacgacgacgcggcgggggcggtggccgcgcctcctgccatcgacttccccgcagaggtgtcggaccccaagtatgatgagtccgacgtccccgcagagctccaagtgttaaaagagcccctacagcagcccacgttccctttcctggtggcaaaccagctgctgctcgtctccttactggaacacttgagccatgtgcacgagtcaaacccgctccactccaaacaggtgtttaaattactgtgccagacttttatcaagatggggctgctctcttcctttacctgcagtgatgagtttagctctctgagactccaccacaacagagccatcactcatttaatgaggtctgccaaagagagagtccgtcaggatccttgtcaagataattcttacatgcagaaaatcagatccagagagatagccttcgaagcacaaacgtcacgctacttaaatgaatttgaagagcttgccatcttagggaaaggaggatatggaagagtttacaaggtccggaacaaattagatggtcagcattatgcaattaagaaaatcctgattaagagcgcaactaaaacagattgtatgaaggtgctacgggaagtgaaggttctggcaggtctccagcatcccaatattgttggctaccacactgcgtggatagaacatgttcatgtggttcagccacaagacagagttccgattcaactgccctctctcgaagtgctgtcggagcaggaaggggacagagaccaaggtggtgttaaagataatgaaagcagttcgtccattgtctttgctgaactcaccccagaaaaagaaaaaccttttggggagtctgaggttaaaaatgagaataacaacctggtgagctacacggccaacttagtggtcaggaacagcagtgaaagtgaatcgtccattgagctccaagaagacggcttgactgatttgtccgtcagaccagttgtcaggcatcagctgccgctggggcatagctcggaattggaagggaattttacatccacggatgagtcttctgaaggcaacttgaacctgctggggcagacggaggttcggtaccacctgatgttgcacatccagatgcagctgtgtgagctctccctgtgggactggataactgagaggaacaagcggagccgggagtatgtggacgaagctgcttgtccctatgttatggccagtgttgcaacaaaaatttttcaagaattggtggaaggtgtcttttacatacataacatgggcattgtccacagagatctgaagcctagaaatatttttcttcatggccctgatcagcaagtaaaaataggagactttggtctggcctgtgcagacatcatccagaatgcagactggaccaacagaaatgggaaaggaacacggacacacacatccagagtggggacttgtctctacgcatcaccggaacagctggagggatcccagtacgatgccaagtcagatatgtatagcttgggtgtgatcctgctcgagctctttcagccattcgggacagaaatggagcgggcaacagtcttaacaggcgtaaggactggtcggatacccgaatccctcagtaaaaggtgtccggtgcaagccaagtatatccagctcctaaccgggaggaatgcgtcacagagaccatctgcccttcagctgctgcagagtgagctttttcaaacaactggaaatgttaatctcacattgcagatgaagataatagaacaagagaaggaaattgaagaactaaagaagcaactaagcctcctttctcaggacagagggctgaagagatgagagggaaaatggggcctaccctgtggcctgagttatgccgccaagcatgtgaaagtggacttgcattacagtcaataggaatgtacatttccaacccttagtgaggacaggtgtgactcccagttgtactgagaaaacctatgtaaagacttaaaaggaccccagcttcctttccctcaacccttccatgacccaagactggactaaatgaagcctcttcctcccacctcctccaagttttgattcctcaatttcctactcaaatgttactccccacccctgaacctatttttttaagctctgcctattgaccaggaatcctgccttccttcccgagggctgtactacagaatcagtgctccctccccacacccgcttgcctgccccaggatgactgccagcctggctgctgttgctgtggcagctgcaagtcttccctggtccttctgtactgctgccatggccagttaccaggacacttgatcactccttggctcaaaatgtctgtgggctctgtactgcctggaaggtcagagttctgcttcgaagcactgtgcactcttccagccctctgttctttccacttggcatcatcctgcagcttgccctaaagtgatctcagcagctaaaatgtcttctacctttattctgtatagtctcccatgatccgttgcctccttaaagccccaactccccaaaccacctgaagtcctcagatagcaatctctgacgccataaagtgcctgcctctggctggcagccatctcagtgcactgcacttggttttactcactttaaaataaaataaactccatagatgatatggt

SEQ ID NO: 106 - protein, 619 aa, Mus musculus
MLGGSSVDGERDTDDDAAGAVAAPPAIDFPAEVSDPKYDESDVPAELQVLKEPLQQPTFPFLVANQLLLVSLLEHLSHVHESNPLHSKQVFKLLCQTFIKMGLLSSFTCSDEFSSLRLHHNRAITHLMRSAKERVRQDPCQDNSYMQKIRSREIAFEAQTSRYLNEFEELAILGKGGYGRVYKVRNKLDGQHYAIKKILIKSATKTDCMKVLREVKVLAGLQHPNIVGYHTAWIEHVHVVQPQDRVPIQLPSLEVLSEQEGDRDQGGVKDNESSSSIVFAELTPEKEKPFGESEVKNENNNLVSYTANLVVRNSSESESSIELQEDGLTDLSVRPVVRHQLPLGHSSELEGNFTSTDESSEGNLNLLGQTEVRYHLMLHIQMQLCELSLWDWITERNKRSREYVDEAACPYVMASVATKIFQELVEGVFYIHNMGIVHRDLKPRNIFLHGPDQQVKIGDFGLACADIIQNADWTNRNGKGTRTHTSRVGTCLYASPEQLEGSQYDAKSDMYSLGVILLELFQPFGTEMERATVLTGVRTGRIPESLSKRCPVQAKYIQLLTGRNASQRPSALQLLQSELFQTTGNVNLTLQMKIIEQEKEIEELKKQLSLLSQDRGLKR

SEQ ID NO: 107 - DNA, 2768 bp, Mus musculus
  CDS (213)..(2069)
gaattccgccgggacctcggccaccagcgcgacccagcgttcgggccgacagacgtcgagtccctgtcggtggccgcagccggagccgaagccgccaaggcagattctcgccttacccgatcccaggcgtcaagctcgacctcttaagaagtgtgctgcagcagcgtctggtgaccggcagagcgaggttactatccacgctccgaacggcaatgctggggggcagctccgtggacggcgagcgcgacacggacgacgacgcggcgggggcggtggccgcgcctcctgccatcgacttccccgcagaggtgtcggaccccaagtatgatgagtccgatgtccccgcagagctccaagtgttaaaagagcccctacagcagcccacgttccctttcctggtggcaaaccagctgctgctcgtctccttactggaacacttgagccatgtgcacgagccaaacccgctccactccaaacaggtgtttaaattactgtgccagacttttatcaagatggggctgctctcttcctttacctgcagtgatgagtttagctctctgagactccaccacaacagagccatcactcatttaatgaggtctgccaaagagagagtccgtcaggatccttgtcaagataattcttacatgcagaaaatcagatccagagagatagccttcgaagcacaaacgtcacgctacttaaatgaatttgaagagcttgccatcttagggaaaggaggatatggaagagtttacaaggtccggaacaaattagatggtcagcattatgcaattaagaaaatcctgattaagagcgcaactaaaacagattgtatgaaggtgctacgggaagtgaaggttctggcaggtctccagcatcccaatattgttggctaccacactgcgtggatagaacatgttcatgtggttcagccacaagacagagttccgattcaactgccctctctcgaagtgctgtcggagcaggaaggggacagagaccaaggtggtgttaaagataatgaaagcagttcgtccattgtctttgctgaactcaccccagaaaaagaaaaaccttttggggagtctgaggttaaaaatgagaataacaacctggtgagctacacggccaacttagtggtcaggaacagcagtgaaagtgaatcgtccattgagctccaagaagacggcttgactgatttgtccgtcagaccagttgtcaggcatcagctgccgctggggcatagctcggaattggaagggaattttacatccacggatgagtcttctgaaggcaacttgaacctgctggggcagacggacgttcggtaccacctgatgttgcacatccagatgcagctgtgtgagctctccctgtgggactggataactgagaggaacaagcggagccgggagtatgtggacgaagctgcttgtccctatgttatggccagtgttgcaacaaaaatttttcaagaattggtggaaggtgtcttttacatacataacatgggcattgtccacagagatctgaagcctagaaatatttttcttcatggccctgatcagcaagtaaaaataggagactttggtctggcctgtgcagacatcatccagaatgcagactggaccaacagaaatgggaaaggaacacggacacacacatccagagtggggacttgtctctacgcatcaccggaacagctggagggatcccagtacgatgccaagtcagatatgtatagcttgggtgtgatcctgctcgagctctttcagccattcgggacagaaatggagagggcaacagtcttaacaggcgtaaggactggtcggatacccgaatccctcagtaaaaggtgtccggtgcaagccaagtatatccagctcctaaccgggaggaatgtgtcacagagaccatctgcccttcagctgctgcagagtgagctttttcaaacaactggaaatgttaatctcacattgcagatgaagataatagaacaagagaaggaaattgaagaactaaagaagcaactaagcctcctttctcaggacagagggctgaagagatgagagggaaaatggggcctaccctgtggcctgagttatgccgccaagcatgtgaaagtggacttgcattatagtcaataggaatgtacatttccaacccttagtgaggacaggtgtgactcccagttgtactgagaaaacctatgtaaagacttaaaaggaccccagcttcctttccctcaacccttccatgacccaagactggactaaatgaagcctcttcctcccacctcctccaagttttgattcctcaatttcctactcaaatgttactccccacccctgaacctatttttttaagctctgcctattgaccaggaatcctgccttccttcccgagggctgtactacagaatcagtgctccctccccacacccgcttgcctgccccaggatgactgccagcctggctgctgttgctgtggcagctgcaagtcttccctggtccttctgtactgctgccatggccagttaccaggacacttgatcactccttggctcaaaatgtctgtgggctctgtactgcctggaaggtcagagttctgcttcgaagcactgtgcactcttccagccctctgttctttccacttggcatcatcctgcagcttgccctaaagtgatctcagcagctaaaatgtcttctacctttattctgtatagtctcccatgatccgttgcctccttaaagccccaactcccc

SEQ ID NO: 108 - protein, 619 aa, Mus musculus
MLGGSSVDGERDTDDDAAGAVAAPPAIDFPAEVSDPKYDESDVPAELQVLKEPLQQPTFPFLVANQLLLVSLLEHLSHVHEPNPLHSKQVFKLLCQTFIKMGLLSSFTCSDEFSSLRLHHNRAITHLMRSAKERVRQDPCQDNSYMQKIRSREIAFEAQTSRYLNEFEELAILGKGGYGRVYKVRNKLDGQHYAIKKILIKSATKTDCMKVLREVKVLAGLQHPNIVGYHTAWIEHVHVVQPQDRVPIQLPSLEVLSEQEGDRDQGGVKDNESSSSIVFAELTPEKEKPFGESEVKNENNNLVSYTANLVVRNSSESESSIELQEDGLTDLSVRPVVRHQLPLGHSSELEGNFTSTDESSEGNLNLLGQTDVRYHLMLHIQMQLCELSLWDWITERNKRSREYVDEAACPYVMASVATKIFQELVEGVFYIHNMGIVHRDLKPRNIFLHGPDQQVKIGDFGLACADIIQNADWTNRNGKGTRTHTSRVGTCLYASPEQLEGSQYDAKSDMYSLGVILLELFQPFGTEMERATVLTGVRTGRIPESLSKRCPVQAKYIQLLTGRNVSQRPSALQLLQSELFQTTGNVNLTLQMKIIEQEKEIEELKKQLSLLSQDRGLKR

SEQ ID NO: 109 - DNA, 3432 bp, Homo sapiens
  CDS (248)..(2569)
actccagcgcgcggctacctacgcttggtgcttgctttctccagccatcggagaccagagccgccccctctgctcgagaaaggggctcagcggcggcggaagcggagggggaccaccgtggagagcgcggtcccagcccggccactgcggatccctgaaaccaaaaagctcctgctgcttctgtaccccgcctgtccctcccagctgcgcagggccccttcgtgggatcatcagcccgaagacagggatggagaggcctctgtgctcccacctctgcagctgcctggctatgctggccctcctgtcccccctgagcctggcacagtatgacagctggccccattaccccgagtacttccagcaaccggctcctgagtatcaccagccccaggcccccgccaacgtggccaagattcagctgcgcctggctgggcagaagaggaagcacagcgagggccgggtggaggtgtactatgatggccagtggggcaccgtgtgcgatgacgacttctccatccacgctgcccacgtcgtctgccgggagctgggctatgtggaggccaagtcctggactgccagctcctcctacggcaagggagaagggcccatctggttagacaatctccactgtactggcaacgaggcgacccttgcagcatgcacctccaatggctggggcgtcactgactgcaagcacacggaggatgtcggtgtggtgtgcagcgacaaaaggattcctgggttcaaatttgacaattcgttgatcaaccagatagagaacctgaatatccaggtggaggacattcggattcgagccatcctctcaacctaccgcaagcgcaccccagtgatggagggctacgtggaggtgaaggagggcaagacctggaagcagatctgtgacaagcactggacggccaagaattcccgcgtggtctgcggcatgtttggcttccctggggagaggacatacaataccaaagtgtacaaaatgtttgcctcacggaggaagcagcgctactggccattctccatggactgcaccggcacagaggcccacatctccagctgcaagctgggcccccaggtgtcactggaccccatgaagaatgtcacctgcgagaatgggctgccggccgtggtgagttgtgtgcctgggcaggtcttcagccctgacggaccctcgagattccggaaagcatacaagccagagcaacccctggtgcgactgagaggcggtgcctacatcggggagggccgcgtggaggtgctcaaaaatggagaatgggggaccgtctgcgacgacaagtgggacctggtgtcggccagtgtggtctgcagagagctgggctttgggagtgccaaagaggcagtcactggctcccgactggggcaagggatcggacccatccacctcaacgagatccagtgcacaggcaatgagaagtccattatagactgcaagttcaatgccgagtctcagggctgcaaccacgaggaggatgctggtgtgagatgcaacacccctgccatgggcttgcagaagaagctgcgcctgaacggcggccgcaatccctacgagggccgagtggaggtgctggtggagagaaacgggtcccttgtgtgggggatggtgtgtggccaaaactggggcatcgtggaggccatggtggtctgccgccagctgggcctgggattcgccagcaacgccttccaggagacctggtattggcacggagatgtcaacagcaacaaagtggtcatgagtggagtgaagtgctcgggaacggagctgtccctggcgcactgccgccacgacggggaggacgtggcctgcccccagggcggagtgcagtacggggccggagttgcctgctcagaaaccgcccctgacctggtcctcaatgcggagatggtgcagcagaccacctacctggaggaccggcccatgttcatgctgcagtgtgccatggaggagaactgcctctcggcctcagccgcgcagaccgaccccaccacgggctaccgccggctcctgcgcttctcctcccagatccacaacaatggccagtccgacttccggcccaagaacggccgccacgcgtggatctggcacgactgtcacaggcactaccacagcatggaggtgttcacccactatgacctgctgaacctcaatggcaccaaggtggcagagggccacaaggccagcttctgcttggaggacacagaatgtgaaggagacatccagaagaattacgagtgtgccaacttcggcgatcagggcatcaccatgggctgctgggacatgtaccgccatgacatcgactgccagtgggttgacatcactgacgtgccccctggagactacctgttccaggttgttattaaccccaacttcgaggttgcagaatccgattactccaacaacatcatgaaatgcaggagccgctatgacggccaccgcatctggatgtacaactgccacataggtggttccttcagcgaagagacggaaaaaaagtttgagcacttcagcgggctcttaaacaaccagctgtccccgcagtaaagaagcctgcgtggtcaactcctgtcttcaggccacaccacatcttccatgggacttccccccaacaactgagtctgaacgaatgccacgtgccctcacccagcccggcccccaccctgtccagacccctacagctgtgtctaagctcaggaggaaagggaccctcccatcattcatggggggctgctacctgacccttggggcctgagaaggccttgggggggtggggtttgtccacagagctgctggagcagcaccaagagccagtcttgaccgggatgaggcccacagacaggttgtcatcagcttgtcccattcaagccaccgagctcaccacagacacagtggagccgcgctcttctccagtgacacgtggacaaatgcgggctcatcagcccccccagagagggtcaggccgaaccccatttctcctcctcttaggtcattttcagcaaacttgaatatctagacctctcttccaatgaaaccctccagtctattatagtcacatagataatggtgccacgtgttttctgatttggtgagctcagacttggtgcttccctctccacaacccccaccccttgtttttcaagatactattattatattttcacagacttttgaagcacaaatttattggcatttaatattggacatctgggcccttggaagtacaaatctaaggaaaaaccaacccactgtgtaagtgactcatcttcctgttgttccaattctgtgggtttttgattcaacggtgctataaccagggtcctgggtgacagggcgctcactgagcaccatgtgtcatcacagacacttacacatacttgaaacttggaataaaagaaagatttatg

SEQ ID NO: 110 - protein, 774 aa, Homo sapiens
MERPLCSHLCSCLAMLALLSPLSLAQYDSWPHYPEYFQQPAPEYHQPQAPANVAKIQLRLAGQKRKHSEGRVEVYYDGQWGTVCDDDFSIHAAHVVCRELGYVEAKSWTASSSYGKGEGPIWLDNLHCTGNEATLAACTSNGWGVTDCKHTEDVGVVCSDKRIPGFKFDNSLINQIENLNIQVEDIRIRAILSTYRKRTPVMEGYVEVKEGKTWKQICDKHWTAKNSRVVCGMFGFPGERTYNTKVYKMFASRRKQRYWPFSMDCTGTEAHISSCKLGPQVSLDPMKNVTCENGLPAVVSCVPGQVFSPDGPSRFRKAYKPEQPLVRLRGGAYIGEGRVEVLKNGEWGTVCDDKWDLVSASVVCRELGFGSAKEAVTGSRLGQGIGPIHLNEIQCTGNEKSIIDCKFNAESQGCNHEEDAGVRCNTPAMGLQKKLRLNGGRNPYEGRVEVLVERNGSLVWGMVCGQNWGIVEAMVVCRQLGLGFASNAFQETWYWHGDVNSNKVVMSGVKCSGTELSLAHCRHDGEDVACPQGGVQYGAGVACSETAPDLVLNAEMVQQTTYLEDRPMFMLQCAMEENCLSASAAQTDPTTGYRRLLRFSSQIHNNGQSDFRPKNGRHAWIWHDCHRHYHSMEVFTHYDLLNLNGTKVAEGHKASFCLEDTECEGDIQKNYECANFGDQGITMGCWDMYRHDIDCQWVDITDVPPGDYLFQVVINPNFEVAESDYSNNIMKCRSRYDGHRIWMYNCHIGGSFSEETEKKFEHFSGLLNNQLSPQ

SEQ ID NO: 111 - DNA, 1956 bp, Homo sapiens
  CDS (13)..(1935)
ctctagaccagaatggaaacgaccttcggacccgccttttcagccgtcaccaccatcacaaaagctgacgggaccagcacctacaagcagcactgcaggacaccctcctcctccagcacccttgcctactccccgcgggacgaggaggacagcatgccccccatcagcactccccgccgctccgactccgccatctctgtccgctccctgcactcagagtccagcatgtctctgcgctccacattctcactgcccgaggaggaggaggagccggagccactggtgtttgcggagcagccctcggtgaagctgtgctgtcagctctgctgcagcgtcttcaaagaccccgtgatcaccacgtgtgggcacacgttctgtaggagatgcgccttgaagtcagagaagtgtcccgtggacaacgtcaaactgaccgtggtggtgaacaacatcgcggtggccgagcagatcggggagctcttcatccactgccggcacggctgccgggtagcgggcagcgggaagccccccatctttgaggtggacccccgagggtgccccttcaccatcaagctcagcgcccggaaggaccacgagggcagctgtgactacaggcctgtgcggtgtcccaacaaccccagctgccccccgctgctcaggatgaacctggaggcccacctcaaggagtgcgagcacatcaaatgcccccactccaagtacgggtgcacgttcatcgggaaccaggacacttacgagacccacctggagacttgccgcttcgagggcctgaaggagtttctgcagcagacggatgaccgcttccacgagatgcacgtggctctggcccagaaggaccaggagatcgccttcctgcgctccatgctgggaaagctctcggagaagatcgaccagctagagaagagcctggagctcaagtttgacgtcctggacgaaaaccagagcaagctcagcgaggacctcatggagttccggcgggacgcatccatgttaaatgacgagctgtcccacatcaacgcgcggctgaacatgggcatcctaggctcctacgaccctcagcagatcttcaagtgcaaagggacctttgtgggccaccagggccctgtgtggtgtctctgcgtctactccatgggtgacctgctcttcagtggctcctctgacaagaccatcaaggtgtgggacacatgtaccacctacaagtgtcagaagacactggagggccatgatggcatcgtgctggctctctgcatccaggggtgcaaactctacagcggctctgcagactgcaccatcattgtgtgggacatccagaacctgcagaaggtgaacaccatccgggcccatgacaacccggtgtgcacgctggtctcctcacacaacgtgctcttcagcggctccctgaaggccatcaaggtctgggacatcgtgggcactgagctgaagttgaagaaggagctcacaggcctcaaccactgggtgcgggccctggtggctgcccagagctacctgtacagcggctcctaccagacaatcaagatctgggacatccgaacccttgactgcatccacgtcctgcagacgtctggtggcagcgtctactccattgctgtgacaaatcaccacattgtctgtggcacctacgagaacctcatccacgtgtgggacattgagtccaaggagcaggtgcggaccctcacgggccacgtgggcaccgtgtatgccctggcggtcatctcgacgccagaccagaccaaagtcttcagtgcatcctacgaccggtccctcagggtctggagtatggacaacatgatctgcacgcagaccctgctgcgtcaccagggcagtgtcaccgcgctggctgtgtcccggggccgactcttctcaggggctgtggatagcactgtgaaggtttggacttgctaacaggatccaggccaggct

SEQ ID NO: 112 - protein, 641 aa, Homo sapiens
METTFGPAFSAVTTITKADGTSTYKQHCRTPSSSSTLAYSPRDEEDSMPPISTPRRSDSAISVRSLHSESSMSLRSTFSLPEEEEEPEPLVFAEQPSVKLCCQLCCSVFKDPVITTCGHTFCRRCALKSEKCPVDNVKLTVVVNNIAVAEQIGELFIHCRHGCRVAGSGKPPIFEVDPRGCPFTIKLSARKDHEGSCDYRPVRCPNNPSCPPLLRMNLEAHLKECEHIKCPHSKYGCTFIGNQDTYETHLETCRFEGLKEFLQQTDDRFHEMHVALAQKDQEIAFLRSMLGKLSEKIDQLEKSLELKFDVLDENQSKLSEDLMEFRRDASMLNDELSHINARLNMGILGSYDPQQIFKCKGTFVGHQGPVWCLCVYSMGDLLFSGSSDKTIKVWDTCTTYKCQKTLEGHDGIVLALCIQGCKLYSGSADCTIIVWDIQNLQKVNTIRAHDNPVCTLVSSHNVLFSGSLKAIKVWDIVGTELKLKKELTGLNHWVRALVAAQSYLYSGSYQTIKIWDIRTLDCIHVLQTSGGSVYSIAVTNHHIVCGTYENLIHVWDIESKEQVRTLTGHVGTVYALAVISTPDQTKVFSASYDRSLRVWSMDNMICTQTLLRHQGSVTALAVSRGRLFSGAVDSTVKVWTC

SEQ ID NO: 113 - DNA, 2937 bp, Mus musculus
  CDS (431)..(2440)
gaaacctttcccggccgcgggccgagaggggcaagatgatgccggtgggtgaagtcgctgctcctaggcagccgcgggcgggtgagtgagtgcgcggagcacaagacctggggctccttcttccggggagtgcggtggagcgcgggctggttgtgggagcgtcgcgagcggtcgtgggcctagcctggggggcgggactgagacggctggggtctcagcctctataagtcctcctgactccaagtaaatccgtctgtcactccttcccttcactctctctttcgttgtctttgcactcctatgtttttttgagcgctgcctgtgtgccaagcagtatcctaggctctggagagtcggcggagaaccggattccaaactgataagctcatctggggacactgcccaaggaacctggattcctctctagagcatgagctcagccaagagtgcccgctacgaccgcttctccgggggacctgccaacctcccttcctcagacagcagtgggaccaggatggaaacaacctttgggcctaccttttcgaccgtcactaccatcaccaaagcagctgatgggactggcacatacaaacagcatcgcaggacaccttcctcctctagcacccttgcctattcgccacgggatgaggaggacggcatgccccccatcaacactcctcgccgctctgactcagccatctctgtccgttccctacactccgagtccagcatgtccctgcgctccacgttctcgctgcctgaggaggaggaggagccggagccgttggtatttgccgagcagccctcggtaaagctgtgttgccagctgtgctgcagtgtgttcaaggaccctgtgatcactacatgtgggcacaccttctgcagacgatgcgccttgaagtcagagaagtgtcctgtggacaatgccaagctgacagtagtggtgaacaacattgcagtcgctgagcagattggagagctcttcatacattgtcggcatggctgccacgcagcgggcactggaaagcctggggtctttgaggtagacccgaggggctgccccttcaccatcaagcttagtgcccggaaggaccacgagagtagttgtgactacaggcctgtgcgctgccccaacaaccccagctgcccaccccttctcaagatgaatctcgaggcccacctgaaagaatgcgagcacatcaagtgtccccactctaagtacgggtgcacatttattgggaatcaggacacctatgagacacacttagaaacatgccgcttcgagggcctgaaggagttcctgcagcagaccgatgaccgcttccacgagatgcatgtggcactggcccaaaaggaccaggagattgccttcctgcgttccatgctgggcaaactctcagagaagattgaccagctagagaagagccttgagcttaagtttgacgtactggatgagaaccagagcaagctcagcgaggacctcatggagttccggagggacgcgtccatgctgaatgatgagctgtctcacatcaatgcacggctgaacatgggtatccttggatcctatgaccctcagcagatcttcaagtgcaaagggacctttgtgggacaccagggccctgtctggtgtctctgtgtctattctatgggtgacctgctcttcagtggctcttctgacaagacaatcaaggtatgggacacgtgtaccacttacaagtgccaaaagacactggaaggtcatgatggtattgtgctggcgctctgtatccaggggtgcaaactgtacagtgggtctgcagactgcaccatcattgtgtgggacatccagaacctacagaaggtgaatactatccgggcccacgacaaccctgtatgcacgctggtgtcttcccacaacatgctcttcagtggctccctgaaagccatcaaggtttgggacatcgtgggcactgagctaaagttgaagaaagaactcacgggcctcaaccactgggtgcgggccctggtggcagcacagagctatctgtacagtggctcttaccagacaatcaagatctgggacattcggacccttgactgcatccatgtcctgcagacatctggtggcagtgtgtattccattgctgtgacgaatcaccacattgtctgtggcacctatgagaacctcattcatgtgtgggacattgaatccaaagagcaggttcggaccctcacaggtcacgtgggcacagtgtatgccctggcagtcatttcaacaccagaccagaccaaagtcttcagtgcatcctatgaccggtccctcagggtctggagtatggacaacatgatctgcacacagactctgctgcgccatcagggcagtgtaactgcactggctgtttcccggggccggctcttctcaggggctgtggatagcaccgtgaaggtctggacatgctaacagaatccaggccaggcttggctccctctgggtctgtaagtcaggctggacctccattggaatgtctgcctgtctgtggagacaggtggacaggctcagctaggcagtgtcctctctgcctatacttggcgagggatctttccaaaggccccgctgttacttgtaccagagaaacacccaggccctcctctgggcaccaggtctgatgcttgcccagccccaccgttcatatcactccatagactcttgttctgagacagggtctcactatgtagctctggctggcctggaactcgctatgtcaaccaggctgacctccaactcacagatctgcctgcctccacctcccaagtgctgggagtaaaggcccgcaccgccgctcctggcaggacccggatgacccaggggtcctttttactcaccttttctactggttttagactgtatatagattttattactttcctgttgaaataaaagctgcacagactgtg

SEQ ID NO: 114 - protein, 670 aa, Mus musculus
MSSAKSARYDRFSGGPANLPSSDSSGTRMETTFGPTFSTVTTITKAADGTGTYKQHRRTPSSSSTLAYSPRDEEDGMPPINTPRRSDSAISVRSLHSESSMSLRSTFSLPEEEEEPEPLVFAEQPSVKLCCQLCCSVFKDPVITTCGHTFCRRCALKSEKCPVDNAKLTVVVNNIAVAEQIGELFIHCRHGCHAAGTGKPGVFEVDPRGCPFTIKLSARKDHESSCDYRPVRCPNNPSCPPLLKMNLEAHLKECEHIKCPHSKYGCTFIGNQDTYETHLETCRFEGLKEFLQQTDDRFHEMHVALAQKDQEIAFLRSMLGKLSEKIDQLEKSLELKFDVLDENQSKLSEDLMEFRRDASMLNDELSHINARLNMGILGSYDPQQIFKCKGTFVGHQGPVWCLCVYSMGDLLFSGSSDKTIKVWDTCTTYKCQKTLEGHDGIVLALCIQGCKLYSGSADCTIIVWDIQNLQKVNTIRAHDNPVCTLVSSHNMLFSGSLKAIKVWDIVGTELKLKKELTGLNHWVRALVAAQSYLYSGSYQTIKIWDIRTLDCIHVLQTSGGSVYSIAVTNHHIVCGTYENLIHVWDIESKEQVRTLTGHVGTVYALAVISTPDQTKVFSASYDRSLRVWSMDNMICTQTLLRHQGSVTALAVSRGRLFSGAVDSTVKVWTC

SEQ ID NO: 115 - DNA, 2473 bp, Mus musculus
  CDS (88)..(1980)
aagatgatgccggtgggtgaagtcgctgctcctaggcagccgcgggcgggggacactgcccaaggaacctggattcctctctagagcatgagctcagccaagagtgcccgctacgaccgcttctccgggggacctgccaacctcccctcctcagacagcagtgggaccaggatggaaacaacctttgggcctaccttttcgaccgtcactaccatcaccaaagcagctgatgggactggcacatacaaacagcatcgcaggacaccttcctcctctagcacccttgcctattcgccacgggatgaggaggacggcatggagccgttggtatttgccgagcagccctcggtaaagctgtgttgccagctgtgctgcagtgtgttcaaggaccctgtgatcactacatgtgggcacaccttctgcagacgatgcgccttgaagtcagagaagtgtcctgtggacaatgccaagctgacagtagtggtgaacaacattgcagtcgctgagcagattggagagctcttcatacattgtcggcatggctgccacgcagcgggcactggaaagcctggggtctttgaggtagacccgaggggctgccccttcaccatcaagcttagtgcccggaaggaccacgagagtagttgtgactacaggcctgtgcgctgccccaacaaccccagctgcccaccccttctcaagatgaatctcgaggcccacctgaaagaatgcgagcacatcaagtgtccccactctaagtacgggtgcacatttattgggaatcaggacacctatgagacacacttagaaacatgccgcttcgagggcctgaaggagttcctgcagcagtccgatgaccgcttccacgagatgcatgtggcactggcccaaaaggaccaggagattgccttcctgcgttccatgctgggcaaactctcagagaagattaaccagctagagaagagccttgagcttaagtttgacgtactggatgagaaccagagcaagctcagcgaggacctcatggagttccggagggacgcgtccatgctgaatgatgagctgtctcacatcaatgcacggctgaacatgggtatccttggatcctatgaccctcagcagatcttcaagtgcaaagggacctttgtgggacaccagggccctgtctggtgtctctgtgtctattccatgggtgacctgctcttcagtggctcttctgacaagacaatcaaggtatgggacacgtgtaccacttacaagtgccaaaagacactggaaggtcatgatggtattgtgctggcgctctgtatccaggggtgcaaactgtacagtgggtctgcagactgcaccatcattgtgtgggacatccagaacctacagaaggtgaatactatccgggcccacgacaaccctgtatgcacgctggtgtcttcccacaacatgctcttcagtggctccctgaaagccatcaaggtttgggacatcgtgggcactgagctaaagttgaagaaagaactcacaggcctcaaccactgggtgcgggccctggtggcagcacagagctatctgtacagtggctcttaccagacaatcaagatctgggacattcggacccttgactgcatccatgtcctgcagacatctggtggcagtgtgtattccattgctgtgacgaatcaccacattgtctgtggcacctatgagaacctcattcatgtgtgggacattgaatccaaagagcaggttcggaccctcacaggtcacgtgggcacagtgtatgccctggcagtcatttcaacaccagaccagaccaaagtcttcagtgcatcctatgaccggtccctcagggtctggagtatggacaacatgatctgcacacagactctgctgcgccatcagggcagtgtaactgcactggctgtttcccggggccggctcttctcaggggctgtggatagcaccgtgaaggtctggacatgctaacagaatccaggccaggcttggctccctctgggtctgtaagtcaggctggacctccattggaatgtctgcctgtctgtggagacaggtagacaggctcagctaggcagtgtcctctctgcctatacttagcgagggatctttccaaaggccccgctgttacttgtaccagagaaacacccaggccctcctctgggcaccaggtctgatgcttgcccagccccaccgttcatatcactccatagactcttgttctgagacagggtctcactatgtagctctggctggcctggaactcgctatgtcaaccaggctgacctccaactcacagatctgcctgcctccacctcccaagtgctgggagtaaaggcccgcaccgccgctcctggcaggacccggatgacccaggggtcctttttactcaccttttctactggttttagactgtatatagattttattactttcctgttgaaataaaagctgcacagac

SEQ ID NO: 116 - protein, 631 aa, Mus musculus
MSSAKSARYDRFSGGPANLPSSDSSGTRMETTFGPTFSTVTTITKAADGTGTYKQHRRTPSSSSTLAYSPRDEEDGMEPLVFAEQPSVKLCCQLCCSVFKDPVITTCGHTFCRRCALKSEKCPVDNAKLTVVVNNIAVAEQIGELFIHCRHGCHAAGTGKPGVFEVDPRGCPFTIKLSARKDHESSCDYRPVRCPNNPSCPPLLKMNLEAHLKECEHIKCPHSKYGCTFIGNQDTYETHLETCRFEGLKEFLQQSDDRFHEMHVALAQKDQEIAFLRSMLGKLSEKINQLEKSLELKFDVLDENQSKLSEDLMEFRRDASMLNDELSHINARLNMGILGSYDPQQIFKCKGTFVGHQGPVWCLCVYSMGDLLFSGSSDKTIKVWDTCTTYKCQKTLEGHDGIVLALCIQGCKLYSGSADCTIIVWDIQNLQKVNTIRAHDNPVCTLVSSHNMLFSGSLKAIKVWDIVGTELKLKKELTGLNHWVRALVAAQSYLYSGSYQTIKIWDIRTLDCIHVLQTSGGSVYSIAVTNHHIVCGTYENLIHVWDIESKEQVRTLTGHVGTVYALAVISTPDQTKVFSASYDRSLRVWSMDNMICTQTLLRHQGSVTALAVSRGRLFSGAVDSTVKVWTC

SEQ ID NO: 117 - DNA, 2696 bp, Mus musculus
  CDS (204)..(2204)
aaagcgtgaagcagcacctagagttcctgaagtccgtgaactacaagttccgacctgcctcgggacttccggctcctgtatcctgaaacctttcccggccgcgggccgagaggggcaagatgatgccggtgggtgaagtcgctgctcctaggcagccgcgggcgggggacactgcccaaggaacctggattcctctctagagcatgagctcagccaagagtgcccgctacgaccgcttctccgggggacctgccaacctcccctcctcagacagcagtgggaccaggatggaaacaacctttgggcctaccttttcgaccgtcactaccatcaccaaagctgatgggactggcacatacaaacagcatcgcaggacaccttcctcctctagcacccttgcctattcgccacgggatgaggaggacggcatgccccccatcaacactcctcgccgctctgactcagccatctctgtccgttccctacactccgagtccagcatgtccctgcgctccacgttctcgctgcctgaggaggaggaggagccggagccgttggtatttgccgagcagccctcggtaaagctgtgttgccagctgtgctgcagtgtgttcaaggaccctgtgatcactacatgtgggcacaccttctgcagacgatgcgccttgaagtcagagaagtgtcctgtggacaatgccaagctgacagtagtggtgaacaacattgcagtcgctgagcagattggagagctcttcatacattgtcggcatggctgccacgcagcgggcactggaaagcctggggtctttgaggtagacccgaggggctgccccttcaccatcaagcttagtgcccggaaggaccacgagagtagttgtgactacaggcctgtgcgctgccccaacaaccccagctgcccaccccttctcaagatgaatctcgaggcccacctgaaagaatgcgagcacatcaagtgtccccactctaagtgcacatttattgggaatcaggacacctatgagacacacttagaaacatgccgcttcgagggcctgaaggagttcctgcagcagaccgatgaccgcttccacgagatgcatgtggcactggcccaaaaggaccaggagattgccttcctgcgttccatgctgggcaaactctcagagaagattgaccagctagagaagagccttgagcttaagtttgacgtactggatgagaaccagagcaagctcagcgaggacctcatggagttccggagggacgcgtccatgctgaatgatgagctgtctcacatcaatgcacggctgaacatgggtatccttggatcctatgaccctcagcagatcttcaagtgcaaagggacctttgtgggacaccagggccctgtctggtgtctctgtgtctattccatgggtgacctgctcttcagtggctcttctgacaagacaatcaaggtatgggacacgtgtaccacttacaagtgccaaaagacactggaaggtcatgatggtattgtgctggcgctctgtatccaggggtgcaaactgtacagtgggtctgcagactgcaccatcattgtgtgggacatccagaacctacagaaggtgaatactatccgggcccacgacaaccctgtatgcacgctggtgtcttcccacaacatgctcttcagtggctccctgaaagccatcaaggtttgggacatcgtgggcactgagctaaagttgaagaaagaactcacaggcctcaaccactgggtgcgggccctggtggcagcacagagctatctgtacagtggctcttaccagacaatcaagatctgggacattcggacccttgactgcatccatgtcctgcagacatctggtggcagtgtgtattccattgctgtgacgaatcaccacattgtctgtggcacctatgagaacctcattcatgtgtgggacattgaatccaaagagcaggttcggaccctcacaggtcacgtgggcacagtgtatgccctggcagtcatttcaacaccagaccagaccaaagtcttcagtgcatcctatgaccggtccctcagggtctggagtatggacaacatgatctgcacacagactctgctgcgccatcagggcagtgtaactgcactggctgtttcccggggccggctcttctcaggggctgtggatagcaccgtgaaggtctggacatgctaacagaatccaggccaggcttggctccctctgggtctgtaagtcaggctggacctccattggaatgtctgcctgtctgtggagacaggtagacaggctcagctaggcagtgtcctctctgcctatacttggcgagggatctttccaaaggccccgctgttacttgtaccagagaaacacccaggccctcctctgggcaccaggtctgatgcttgcccagccccaccgttcatatcactccatagactcttgttctgagacagggtctcactatgtagctctggctggcctggaactcgctatgtcaaccaggctgacctccaactcacagatctgcctgcctccacctcccaagtgctgggagtaaaggcccgcaccgccgctcctggcaggacccggatgacccaggggtcctttttactcaccttttctactggttttagactgtatatagattttattactttcctgttgaaataaaagctgccagac

SEQ ID NO: 118 - protein, 667 aa, Mus musculus
MSSAKSARYDRFSGGPANLPSSDSSGTRMETTFGPTFSTVTTITKADGTGTYKQHRRTPSSSSTLAYSPRDEEDGMPPINTPRRSDSAISVRSLHSESSMSLRSTFSLPEEEEEPEPLVFAEQPSVKLCCQLCCSVFKDPVITTCGHTFCRRCALKSEKCPVDNAKLTVVVNNIAVAEQIGELFIHCRHGCHAAGTGKPGVFEVDPRGCPFTIKLSARKDHESSCDYRPVRCPNNPSCPPLLKMNLEAHLKECEHIKCPHSKCTFIGNQDTYETHLETCRFEGLKEFLQQTDDRFHEMHVALAQKDQEIAFLRSMLGKLSEKIDQLEKSLELKFDVLDENQSKLSEDLMEFRRDASMLNDELSHINARLNMGILGSYDPQQIFKCKGTFVGHQGPVWCLCVYSMGDLLFSGSSDKTIKVWDTCTTYKCQKTLEGHDGIVLALCIQGCKLYSGSADCTIIVWDIQNLQKVNTIRAHDNPVCTLVSSHNMLFSGSLKAIKVWDIVGTELKLKKELTGLNHWVRALVAAQSYLYSGSYQTIKIWDIRTLDCIHVLQTSGGSVYSIAVTNHHIVCGTYENLIHVWDIESKEQVRTLTGHVGTVYALAVISTPDQTKVFSASYDRSLRVWSMDNMICTQTLLRHQGSVTALAVSRGRLFSGAVDSTVKVWTC

SEQ ID NO: 119 - DNA, 2643 bp, Mus musculus
  CDS (347)..(2146)
aaaagcgtgaagcagcacctagagttcctgaagtccgtgaactacaagttccgacctgcctcgggacttccggctcctgtatcctgaaacctttcccggccgcgggccgagaggggcaagatgatgccggtgggtgaagtcgctgctcctaggcagccgcgggcgggggacactgcccaaggaacctggattcctctctagagcatgagctcagccaagagtgcccgctacgaccgcttctccgggggacctgccaacctcccctcctcagacagcagtgggaccaggatggaaacaacctttgggcctaccttttcgaccgtcactaccatcaccaaagcagctgatgggactggcacatacaaacagcatcgcaggacaccttcctcctctagcacccttgcctattcgccacgggatgaggaggacggcatgcatgtccctgcgctccacgttctcgctgcctgaggaggaggaggagccggagccgttggtatttgccgagcagccctcggtaaagctgtgttgccagctgtgctgcagtgtgttcaaggaccctgtgatcactacatgtgggcacaccttctgcagacgatgcgccttgaagtcagagaagtgtcctgtggacaatgccaagctgacagtagtggtgaacaacattgcagtcgctgagcagattggagagctcttcatacattgtcggcatggctgccacgcagcgggcactggaaagcctggggtctttgaggtagacccgaggggctgccccttcaccatcaagcttagtgcccggaaggaccacgagagtagttgtgactacaggcctgtgcgctgccccaacaaccccagctgcccaccccttctcaagatgaatctcgaggcccacctgaaagaatgcgagcacatcaagtgtccccactctaagtacgggtgcacatttattgggaatcaggacacctatgagacacacttagaaacatgccgcttcgagggcctgaaggagttcctgcagcagaccgatgaccgcttccacgagatgcatgtggcactggcccaaaaggaccaggagattgccttcctgcgttccatgctgggcaaactctcagagaagattgaccagctagagaagagccttgagcttaagtttgacgtactggatgagaaccagagcaagctcagcgaggacctcatggagttccggagggacgcgtccatgctgaatgatgagctgtctcacatcaatgcacggctgaacatgggtatccttggatcctatgaccctcagcagatcttcaagtgcaaagggacctttgtgggacaccagggccctgtctggtgtctctgtgtctattccatgggtgacctgctcttcagtggctcttctgacaagacaatcaaggtatgggacacgtgtaccacttacaagtgccaaaagacactggaaggtcatgatggtattgtgctggcgctctgtatccaggggtgcaaactgtacagtgggtctgcagactgcaccatcattgtgtgggacatccagaacctacagaaggtgaatactatccgggcccacgacaaccctgtatgcacgctggtgtcttcccacaacatgctcttcagtggctccctgaaagccatcaaggtttgggacatcgtgggcactgagctaaagttgaagaaagaactcacaggcctcaaccactgggtgcgggccctggtggcagcacagagctatctgtacagtggctcttaccagacaatcaagatctgggacattcggacccttgactgcatccatgtcctgcagacatctggtggcagtgtgtattccattgctgtgacgaatcaccacattgtctgtggcacctatgagaacctcattcatgtgtgggacattgaatccaaagagcaggttcggaccctcacaggtcacgtgggcacagtgtatgccctggcagtcatttcaacaccagaccagaccaaagtcttcagtgcatcctatgaccggtccctcagggtctggagtatggacaacatgatctgcacacagactctgctgcgccatcagggcagtgtaactgcactggctgtttcccggggccggctcttctcaggggctgtggatagcaccgtgaaggtctggacatgctaacagaatccaggccaggcttggctccctctgggtctgtaagtcaggctggacctccattggaatgtctgcctgtctgtggagacaggtagacaggctcagctaggcagtgtcctctctgcctatacttggcgagggatctttccaaaggccccgctgttacttgtaccagagaaacacccaggccctcctctgggcaccaggtctgatgcttgcccagccccaccgttcatatcactccatagactcttgttctgagacagggtctcactatgtagctctggctggcctggaactcgctatgtcaaccaggctgacctccaactcacagatctgcctgcctccacctcccaagtgctgggagtaaaggcccgcaccgccgctcctggcaggacccggatgacccaggggtcctttttactcacctttcctactggttttagactgtatatagattttattactttcctgttgaaataaaagctgcacagactgtg

SEQ ID NO: 120 - protein, 600 aa, Mus musculus
MGLAHTNSIAGHLPPLAPLPIRHGMRRTACMSLRSTFSLPEEEEEPEPLVFAEQPSVKLCCQLCCSVFKDPVITTCGHTFCRRCALKSEKCPVDNAKLTVVVNNIAVAEQIGELFIHCRHGCHAAGTGKPGVFEVDPRGCPFTIKLSARKDHESSCDYRPVRCPNNPSCPPLLKMNLEAHLKECEHIKCPHSKYGCTFIGNQDTYETHLETCRFEGLKEFLQQTDDRFHEMHVALAQKDQEIAFLRSMLGKLSEKIDQLEKSLELKFDVLDENQSKLSEDLMEFRRDASMLNDELSHINARLNMGILGSYDPQQIFKCKGTFVGHQGPVWCLCVYSMGDLLFSGSSDKTIKVWDTCTTYKCQKTLEGHDGIVLALCIQGCKLYSGSADCTIIVWDIQNLQKVNTIRAHDNPVCTLVSSHNMLFSGSLKAIKVWDIVGTELKLKKELTGLNHWVRALVAAQSYLYSGSYQTIKIWDIRTLDCIHVLQTSGGSVYSIAVTNHHIVCGTYENLIHVWDIESKEQVRTLTGHVGTVYALAVISTPDQTKVFSASYDRSLRVWSMDNMICTQTLLRHQGSVTALAVSRGRLFSGAVDSTVKVWTC

SEQ ID NO: 121 - DNA, 2909 bp, Mus musculus
  CDS (11)..(2158)
gtgcgggaagatggcacctgccggctgcggctgcggctgctcgggcagcttgggtgctgcggtggtgcggccgctgctcctgctgctgggggcgctggcctgcgtgcgggccaccgagcactactctccgctgtccttgctgaagcaggagcttcagcaccggcagcagcaggaggccccggcgggcggcggctgtccgcagtcgggggactgggcggaccagtacccggagtgcgagtcgtcatttttgaacttccacgagtctgactgcgaactgagaggctcggcgccctgtgactcgctcctctctctcaacactgaaaagattttgagccaggccaagtctattgcagagcagaagagattcccatttgctaccgacaatgacagcaccaatgaagaattagcgattgcttatgtcctggtgggcagcggtctctacgatgaagccataagacacttttccacgatgctccaggaagccatcgaggccttcaaagaagctctgaaacagaaagttgactttatcgatgcatataaaagtctgggacaggcctacagagaactgggcaactttgacgcagccaccgagagcttccagaaggccctgctgctcaaccagaaccacgtgcagacccagcagctgcgggggatgatgctctaccaccacggaagcctgcaggaggccctaaagaacttcaagcgctgcctgcaactggaaccgtacaacgaactgtgccagtacatgaaggggctgagccatgtggccatggggcagttttacgaagggattaaagcacaaaccaaagttatgctgaatgaccctcttccaggccagaaggccagcccagagtacctgagggtcaagtacctacgagagtattctcgatatctgcacgcacacctcgatacccctctgacggaatataacattgactcggatctaccgggcagcttcaaggaccactgggccaagaacctgcctttcctcatagacggctatgaagagcagcccggcctgcagcctcacatcagggatgtgttacatcagaatttcgagggctacaagcctgaagtccaggagctgatctgtgtagctgaccgcctgggctcgctgatgcagtatgaaacaccggggttcctgcccaacaagaggatacacagagccatgggcctggcagcactggaagtcatgcaggccgtacatcgtacctggaccaactcaaaggttcgcatgaatggaaaaacaaggctgctgcagtggagggacatgttcgacattgccgtgaagtggagaaggatcgctgatccggaccagcctgtcctgtggctggatcagatgccagctccaagtctcagcagagggttcaataaccacatcaacttaatcaggggtcaagtgatcaatatgagatatctggaatattttgagaaaatacttcattttattaaagatagaattcttgtttatcacggagcaaataatccaaagggcttattggaagtcagagaagctctggaaaaggtacacaaagtggaagatctccttccaattatgaagcagtttaataccaaaacaaaggacgggttcaccgtgaacaccaaagtccccagcctcaaagatcaagggaaggaatatgacggcttcaccatcaccatcacgggagacaaggtcggcaatatcctattttctgtggaaactcaaaccacagaagagaggacacagctgtatcacgctgaaatagatgcactttataaagacctgacagcgaagggcaaagtactgaccctctcggcagaattcggggaggctgatgctgtctgcaacttaatcttatccttagtgtattacttttataatttaatgcccctgtctcgaggatctagtgtcattgcgtattcagtcattgtgggagcgctgatggccagtggcaaagaagtggctgggaagatccccaaagggaagttagtcgactttgaagccatgacagcccctggctcagaggccttcagcaaaatagcaaaaagctggatgaacttgaagagtatttccccttcctacaagaccctgccatcagtatcagagacgttcccgactctgaggtccatgatcgaggtgctcaacacggattccaccccacggtgtctaaagaaactctagccagatcagaggatttatacacatgaagggccaggcctctcacttcttaagttattttttaagacatggaattattatggaattaggtcctttattacttttgataccaatttttgataggaattgaatacttgaaaacattttctttactttttctgaaccgtaagagaaatcatgaaaacgggttttttggggaaaagctacttgaccaggaagggaagtatgcgtattagtggcagcctgttggttcccatgtgttaaggtatactgctccttccttacagcaaaaaaatgtttacttcagaaaccaaaaattaataattaagatgaagaaagccaacaaccagcagggcttgtcttcactgtcagaggtgtgggtgttcctcagacctccttcctgtgcacctctgtggggtgcctcgctactgccatgcccccacatgtgggccctccagcccccctagaactgtggaagggccccagcacccacggttccatggcttgtgacaagaagcactggccagacgacagacagtatttgccaatcactgaaccatatttttcttttctttgttggaaaaaataagccgaggtgatttctgaaagtcgccatgttcaggcactggattacgttgtgtttgtgtgcgagctagttttgctttcaggtgtaagagcgtttagaacgtttcttgtttcctcagacagggtggaagatggaggaataaggtccattaaaggctgcagtttc

SEQ ID NO: 122 - protein, 716 aa, Mus musculus
MAPAGCGCGCSGSLGAAVVRPLLLLLGALACVRATEHYSPLSLLKQELQHRQQQEAPAGGGCPQSGDWADQYPECESSFLNFHESDCELRGSAPCDSLLSLNTEKILSQAKSIAEQKRFPFATDNDSTNEELAIAYVLVGSGLYDEAIRHFSTMLQEAIEAFKEALKQKVDFIDAYKSLGQAYRELGNFDAATESFQKALLLNQNHVQTQQLRGMMLYHHGSLQEALKNFKRCLQLEPYNELCQYMKGLSHVAMGQFYEGIKAQTKVMLNDPLPGQKASPEYLRVKYLREYSRYLHAHLDTPLTEYNIDSDLPGSFKDHWAKNLPFLIDGYEEQPGLQPHIRDVLHQNFEGYKPEVQELICVADRLGSLMQYETPGFLPNKRIHRAMGLAALEVMQAVHRTWTNSKVRMNGKTRLLQWRDMFDIAVKWRRIADPDQPVLWLDQMPAPSLSRGFNNHINLIRGQVINMRYLEYFEKILHFIKDRILVYHGANNPKGLLEVREALEKVHKVEDLLPIMKQFNTKTKDGFTVNTKVPSLKDQGKEYDGFTITITGDKVGNILFSVETQTTEERTQLYHAEIDALYKDLTAKGKVLTLSAEFGEADAVCNLILSLVYYFYNLMPLSRGSSVIAYSVIVGALMASGKEVAGKIPKGKLVDFEAMTAPGSEAFSKIAKSWMNLKSISPSYKTLPSVSETFPTLRSMIEVLNTDSTPRCLKKL

SEQ ID NO: 123 - DNA, 1592 bp, Homo sapiens
  CDS (6)..(929)
ttcgaatgaatgggaagacacggttgatgcagtggagagacatgtttgacattgcagttaaatggagaaggattgctgacccagaccagcccgtgctgtggttagatcaaatgccagcacgaagtcttagcagaggttttaacaaccacattaatttaatcaggggtcaggtgatcaacatgagatacctagaatattttgagaaaatacttcattttattaaagacagaattcttgtttatcatggagctaataatcctaaaggattgctggaagttcgggaagccctggaaaaggtacacaaagtagaagaccttcttccgattatgaagcagtttaatactaaaacgaaggatgggttcaccgtgaacacaaaagttcccagccttaaagaccaagggaaggaatatgatggattcacaatcacgattacaggagacaaagttggcaatatattattttctgtggaaactcaaaccacggaagaaaggacacaattatatcatgctgaaatagatgcactttataaagatttgacagcaaaaggaaaagtattgattctttcatcagaatttggggaggctgatgctgtctgcaacttaatcttatccttagtttattacttttataatttaatgccactctctcgaggatccagtgtaattgcttactcggtcatcgtgggagcactgatggcaagtggaaaagaagtagcaggaaaaattcccaaagggaagttagtcgactttgaagctatgacagcccctggttcagaggcctttagcaaagtcgccaaaagctggatgaacttgaaaagtatttcaccttcttataagactcttccatcagtttcagaaacgtttccaacgttaagatcgatgattgaggtgctaaacacagactcttctccacgttgtcttaagaaactctagttctgctgctgtatttatacaagtaaagggccggacctcttgcttcttaagttatttcttaaaacatggaattataaagaaattaggtcctctattacttttgataccaatttttataggaattgaatacttgaaatcattttctttacttttctgaaccataatgaaaatcatgaaagaggctttcggggggaaaaagctacttgacttggagggaaagcgtatgtattagccggcagcctgttggttcccacttataaagtcatataactccttccttacagtaaaaaaaattttcctcaacaactaaaatataatactgaagatgaacaaaaacaaaaccaaataggagtgtttgtattcctttagagatctggatatttttcaaagacttgctttttacgcacattgtgatagagcatcttttgttgactcacgtaacctccatgtgtgggtcctttgttttattagaaccatggaagaaggttcctgggccatcagtatgtgttgcagagctcacagccaggaacacttattttgaacaatgcagacagtacttgccagagtcccaaatgctgaattattgaaccatgtttttttttcctttgttgaaaaaaataaaccagggtgatttctataaatcaccagtttttggcattg

SEQ ID NO: 124 - protein, 308 aa, Homo sapiens
MNGKTRLMQWRDMFDIAVKWRRIADPDQPVLWLDQMPARSLSRGFNNHINLIRGQVINMRYLEYFEKILHFIKDRILVYHGANNPKGLLEVREALEKVHKVEDLLPIMKQFNTKTKDGFTVNTKVPSLKDQGKEYDGFTITITGDKVGNILFSVETQTTEERTQLYHAEIDALYKDLTAKGKVLILSSEFGEADAVCNLILSLVYYFYNLMPLSRGSSVIAYSVIVGALMASGKEVAGKIPKGKLVDFEAMTAPGSEAFSKVAKSWMNLKSISPSYKTLPSVSETFPTLRSMIEVLNTDSSPRCLKKL

SEQ ID NO: 125 - DNA, 3932 bp, Homo sapiens
  CDS (61)..(2292)
gcgggggcgggctttgccgagcgcagagctgcagccgccgagccggacgtgtgcgcgaagatggcgggccggagcatgcaagcggcaagatgtcctacagatgaattatctttaaccaattgttcagttgtgaatgaaaaggatttccagtctggccagcatgtgattgtgaggacctctcccaatcacaggtacacatttacactgaagacacatccatcggtggttccagggagcattgcattcagtttacctcagagaaaatgggctgggctttctattgggcaagaaatagaagtctccttatatacatttgacaaagccaaacagtgtattggcacaatgaccatcgagattgatttcctgcagaaaaaaagcaatgactccaacccttatgacaccgacaagatggcagcagaatttattcagcaattcaacaaccaggcctactcagtgggacaacagcttgtctttagcttcaatgaaaagctttttggcttactggtgaaggacattgaatccatggatcctagcatcctgaagggagagcctgcgacagggaaaaggcagaagattgaagtaggactggttgttggaaacagtcaagttgcatttgaaaaagcagaaaattcgtcacttaatcttattggcaaagctaaaaccaaggaaaatcgccaatcaattatcaatcctgactggaactttgaaaaaatgggaataggaggtctagacaaggaattttcagatattttccgacgagcatttgccttccgagtatttcctccagagattgtggagcagatgggttgtatacatgttaaaggcatcctgttatatggacccccaggttgtggtaagactctcttggctcgacagattggcaagatgttgaatgcaagagagcccaaagtggtcaatgggccagaaatccttaacaaatatgtgggagaatcagaggctaacattcgcaaactttttgctgatgctgaagaggagcaaaggaggcttggtgctaacagtggtttgcacatcatcatctttgatgaaattgatgccatctgcaagcagagagggagcatggctggtagcacgggagttcatgacactgttgtcaaccagttgctgtccaaaattgatggcgtggagcagctaaacaacatcctagtcattggaatgaccaatagaccagatctgatagatgaggctcttcttagacctggaagactggaagttaaaatggagataggcttgccagatgagaaaggccgactacagattcttcacatccacacagcaagaatgagagggcatcagttactctctgctgatgtagacattaaagaactggccgtggagaccaagaatttcagtggtgctgaattggagggtctggtgcgagcagcccagtccactgctatgaatagacacataaaggccagtactaaagtggaagtggacatggagaaagcagaaagcctgcaagtgacgagaggagacttccttgcttctttggagaatgatatcaaaccagcctttggcacaaaccaagaagattatgcaagttacattatgaacggtatcatcaaatggggtgacccagttactcgagttctagatgatggggagctgctggtgcagcagactaagaacagtgaccgcacaccattggtcagcgtgcttctggaaggccctcctcacagtgggaagactgctttagctgcaaaaattgcagaggaatccaacttcccgttcatcaagatctgttctcctgataaaatgattggcttttctgaaacagccaaatgtcaggccatgaagaagatctttgatgatgcgtacaaatcccagctcagttgtgtggttgtggatgacattgagagattgcttgattacgtccctattggccctcgattttcaaatcttgtattacaggctcttctcgttttactgaaaaaggcacctcctcagggccgcaagcttcttatcattgggaccactagccgcaaagatgtccttcaggagatggaaatgcttaacgctttcagcaccaccatccacgtgcccaacattgccacaggagagcagctgttggaagctttggagcttttgggcaacttaaaggataaggaacgcaccacaattgcacagcaagtcaaagggaagaaggtctggataggaatcaagaagttactaatgctgatcgagatgtccctacagatggatcctgaataccgtgtgagaaaattcttggccctcttaagagaagaaggagctagcccccttgattttgattgaaaatgaactatttgaaacacacagtgaccaagggaagtgaccaaggtgaagatggcctaggatcttcactgtcttactcaagatactggactaagtggaacgttctctaccttcaacatgtgctcgctctgcatgattagtgcaataaaactcccttccttatgcatactgagatagcttagtgtctcgtggaaggtgtcaatttggtttagaatgctgcgcttaccttcccatgcaggctaaagtgattccttcttgctcagtccctctgggtgggaaccatccagtacttgtggacactacacgtttcaacctctctactagcaccatcacccttgaaaactctcagtcagtgtcatgaatgttgcatgacaacagttggccgattagaaggcagactttctacatgcaaatctggcttagtaaatcgaggtgtgggccagagatcctctgacagctgtcctgagctaacactaaaagtcactgggtatttggttaaaggtctcccacaagactggtattctctttgcctgaagaaacaaggcattgaatctctaaaatgctgttctcaatcattgtcagagatgttttcaagttgcagtcagaagatctttcttaatagaaagtcagatgactaccgtgttggttgtgacttccccttaagtataactaatttgctctgtggtaagagatatgctcattattaccacttagaagatgttgttaaaaacatgtgaaagataggtatggaaaaagcatacacccccaaacagaaaggagttattaaagtaatttacaaacctctcagcactaattagtgtccaactccaagtgggtcaattccttagtataatattaaggcttactagtatcactgctttttccttagcttaatgacttacttagaatttatcctttattttaaatgatctgtactatctagtgtctaaaacactattctccagaaaaatcaatcattttctagccctctccctcagtcctttattgtccattccaatacattgaacacatttcctttaccctccacacacttcttccaaaaggaagcacccgttgagtccttttgagggtgatttgtcttacaactgactgacttagcaggaatttaattaggtcatatttggtgatgagacttatggagtgtgcctctctctcccaactgctgcttaaaatgcaaggacaagcaattagaagccatcctaaggtgcttacctcacacgccacccatgaggcttgtggccacagtggcacttgggtgtggctcctctgttatttgtcctcatgtgagaaagcagatcatctccaaatcttgccatttgtatacttttggtggagacttggatgtcatatcttctttgttttgggttttcttccctagcttattttgtggcttttaaagaagtggattgtattgtgagatcctgtgattcctggtggccagtatcctggattcctctaagatcttgcctctttcctcctcatgaaagcagcacacattgtgttaacttatgtctcttgttaaatgagcttaatgtctttgtgttttgtccaaaactgtattgaaaaaatattgtttaatgcaaatgaaggaatgcaataaagagtaaatatacttg

SEQ ID NO: 126 - protein, 744 aa, Homo sapiens
MAGRSMQAARCPTDELSLTNCSVVNEKDFQSGQHVIVRTSPNHRYTFTLKTHPSVVPGSIAFSLPQRKWAGLSIGQEIEVSLYTFDKAKQCIGTMTIEIDFLQKKSNDSNPYDTDKMAAEFIQQFNNQAYSVGQQLVFSFNEKLFGLLVKDIESMDPSILKGEPATGKRQKIEVGLVVGNSQVAFEKAENSSLNLIGKAKTKENRQSIINPDWNFEKMGIGGLDKEFSDIFRRAFAFRVFPPEIVEQMGCIHVKGILLYGPPGCGKTLLARQIGKMLNAREPKVVNGPEILNKYVGESEANIRKLFADAEEEQRRLGANSGLHIIIFDEIDAICKQRGSMAGSTGVHDTVVNQLLSKIDGVEQLNNILVIGMTNRPDLIDEALLRPGRLEVKMEIGLPDEKGRLQILHIHTARMRGHQLLSADVDIKELAVETKNFSGAELEGLVRAAQSTAMNRHIKASTKVEVDMEKAESLQVTRGDFLASLENDIKPAFGTNQEDYASYIMNGIIKWGDPVTRVLDDGELLVQQTKNSDRTPLVSVLLEGPPHSGKTALAAKIAEESNFPFIKICSPDKMIGFSETAKCQAMKKIFDDAYKSQLSCVVVDDIERLLDYVPIGPRFSNLVLQALLVLLKKAPPQGRKLLIIGTTSRKDVLQEMEMLNAFSTTIHVPNIATGEQLLEALELLGNLKDKERTTIAQQVKGKKVWIGIKKLLMLIEMSLQMDPEYRVRKFLALLREEGASPLDFD

SEQ ID NO: 127 - DNA, 3926 bp, Homo sapiens
  CDS (53)..(2284)
cccttccttggagcgcagagctgcagccgccgagccggacgtgtccgcgaagatggcgggccggagcatgcaagcggcaagatgtcctacagatgaattatctttaaccaattgtgcagttgtgaatgaaaaggatttccagtctggccagcatgtgattgtgaggacctctcccaatcacaggtacacatttacactgaagacacatccatcggtggttccagggagcattgcattcagtttacctcagagaaaatgggctgggctttctattgggcaagaaatagaagtctccttatatacatttgacaaagccaaacagtgtattggcacaatgaccatcgagattgatttcctgcagaaaaaaagcaatgactccaacccttatgacaccgacaagatggcagcagaatttattcagcaattcaacaaccaggcctactcagtgggacaacagcttgtctttagcttcaatgaaaagctttttggcttactggtgaaggacattgaatccatggatcctagcatcctgaagggagagcctgcgacagggaaaaggcagaagattgaagtaggactggttgttggaaacagtcaagttgcatttgaaaaagcagaaaattcgtcacttaatcttattggcaaagctaaaaccaaggaaaatcgccaatcaattatcaatcctgactggaactttgaaaaaatgggaataggaggtctagacaaggaattttcagatattttccgacgagcatttgccttccgagtatttcctccagagattgtggagcagatgggttgtatacatgttaaaggcatcctgttatatggacccccaggttgtggtaagactctcttggctcgacagattggcaagatgttgaatgcaagagagcccaaagtggtcaatgggccagaaatccttaacaaatatgtgggagaatcagaggctaacattcgcaaactttttgctgatgctgaagaggagcaaaggaggcttggtgctaacagtggtttgcacatcatcatctttgatgaaattgatgccatctgcaagcagagagggagcatggctggtagcacgggagttcatgacactgttgtcaaccagttgctgtccaaaattgatggcgtggagcagctaaacaacatcctagtcattggaatgaccaatagaccagatctgatagatgaggctcttcttagacctggaagactggaagttaaaatggagataggcttgccagatgagaaaggccgactacagattcttcacatccacacagcaagaatgagagggcatcagttactctctgctgatgtagacattaaagaactggccgtggagaccaagaatttcagtggtgctgaattggagggtctggtgcgagcagcccagtccactgctatgaatagacacataaaggccagtactaaagtggaagtggacatggagaaagcagaaagcctgcaagtgacgagaggagacttccttgcttctttggagaatgatatcaaaccagcctttggcacaaaccaagaagattatgcaagttacattatgaacggtatcatcaaatggggtgacccagttactcgagttctagatgatggggagctgctggtgcagcagactaagaacagtgaccgcacaccattggtcagcgtgcttctggaaggccctcctcacagtgggaagactgctttagctgcaaaaattgcagaggaatccaacttcccgttcatcaagatctgttctcctgaaaaaatgattggcttttctgaaacagccaaatgtcaggccatgaagaagatctttgatgatgcgtacaaatcccagctcagttgtgtggttgtggatgacattgagagattgcttgattacgtccctattggccctcgattttcaaatcttgtattacaggctcttctcgttttactgaaaaaggcacctcctcagggccgcaagcttcttatcattgggaccactagccgcaaagatgtccttcaggagatggaaatgcttaacgctttcagcaccaccatccacgtgcccaacattgccacaggagagcagctgttggaagctttggagcttttgggcaacttaaaggataaggaacgcaccacaattgcacagcaagtcaaagggaagaaggtctggataggaatcaagaagttactaatgctgatcgagatgtccctacagatggatcctgaataccgtgtgagaaaattcttggccctcttaagagaagaaggagctagcccccttgattttgattgaaaatgaactatttgaaacacacagtgaccatgggaagtgaccaaggtgaggatggcctaggatcttcactgtcttactcaagatactggactaagtggaacgtttctctaccttcaacatgtgctcgctctgcatgattagtgcaataacccttccttatgcatactgagatagcttagtgtctcgtggaaggtgtcaatttggtttagaatgctgcgcttaccttcccatgcaggctaaagtgattccttcttgctcagtccctctgggtgggaaccatccagtacttgtggacactacacgtttcaacctctctactagcaccatcacccttgataactctcagtcagtgtcatgaatgttgcatgacaacagttggccgattagaaggcagactttctacatgcaaatctggcttagtaaatcgaggtgtgggccagagatcctctgacagctgtcctgagctaacactaaaagtcactgggtatttggttaaaggtctcccacaagactggtattctctttgcctgaagaaacaaggcattgaatctctaaaatgctgttctcaatcattgtcagagatgttttcaagttgcagtcagaagatctttcttaatagaaagtcagatgactaccgtgttggttgtgacttccccttaagtataactaatttgctctgtgggtaagagatatgctcattattaccacttagaagatgttgttaaaaacatgtgaaagataggtatggaaaaagcatacacccccaaacagaaaggagttattaaagtaatttacaaacctctcagcactaattagtgtccaactccaagtgggtcaattccttagtataatattaaggcttactagtatcactgctttttccttagcttaatgacttacttaggaatttatcctttattttaaatgatctggtactatctagtggcctaaaacacctattctccagaaaaatccatcattttctagccctctccctcagtcctttattgtccattccaatacattgaacacatttcctttaccctccacacacttcttccaaaaggaagcacccgttgagtccttttgagggtgatttgtcttacaactgactgacttagcaggaatttaattaggtcatatttggtgatgagacttatggagtgtgcctctctctcccaactgctgcttaaaatgcaaggacaagcaattagaagccatcctaaggtgcttacctcacacgccacccatgaggcttgtggccacagtggcacttgggtgtggctcctctgttatttgtcctcatgtgagaaagcagatcatctccaaatcttgccatttgtatacttttggtggagacttggatgtcatatcttctttgttttgggttttcttccctagcttattttgtggcttttaaagaagtggattgtattgtgagatcctgtgattcctggtggccagtatcctggattcctctaagatcttgcctctttcctcctcatgaaagcagcacacattgtgttaacttatgtctcttgttaaatgagcttaatgtctttgtgttttgtccaaaactgtattgaaaaaatattgtttaatgcaaatgaaggaatgcaataaagagtaaatatacttg

SEQ ID NO: 128 - protein, 744 aa, Homo sapiens [sequence omitted]

SEQ ID NO: 129 - DNA, 3348 bp, Homo sapiens
  CDS (129)..(2345)
  unsure 9: n=A or C or G or T
  unsure 44: n=A or C or G or T
  unsure 47: n=A or C or G or T
  unsure 3319: n=A or C or G or T
gagaaggtntctttctctgttgcccaggctggagtgcagcggcngangctcggatcactacaacctctgcctctcgggttcaagcagttctcctgcctcagcctcccaagtagctgagattacagagcatgcaagcggcaagatgtcctacagatgaattatctttaaccaattgttcagttgtgaatgaaaaggatttccagtctggccagcatgtgattgtgaggacctctcccaatcacaggtacacatttacactgaagacacatccatcggtggttccagggagcattgcattcagtttacctcagagaaaatgggctgggctttctattgggcaagaaatagaagtctccttatatacatttgacaaagccaaacagtgtattggcacaatgaccatcgagattgatttcctgcagaaaaaaagcaatgactccaacccttatgacaccgacaagatggcagcagaatttattcagcaattcaacaaccaggcctactcagtgggacaacagcttgtctttagcttcaatgaaaagctttttggcttactggtgaaggacattgaatccatggatcctagcatcctgaagggagagcctgcgacagggaaaaggcagaagattgaagtaggactggttgttggaaacagtcaagttgcatttgaaaaagcagaaaattcgtcacttaatcttattggcaaagctaaaaccaaggaaaatcgccaatcaattatcaatcctgactggaactttgaaaaaatgggaataggaggtctagacaaggaattttcagatattttccgacgagcatttgccttccgagtatttcctccagagattgtggagcagatgggttgtatacatgttaaaggcatcctgttatatggacccccaggttgtggtaagactctcttggctcgacagattggcaagatgttgaatgcaagagagcccaaagtggtcaatgggccagaaatccttaacaaatatgtgggagaatcagaggctaacattcgcaaactttttgctgatgctgaagaggagcaaaggaggcttggtgctaacagtggtttgcacatcatcatctttgatgaaattgatgccatctgcaagcagagagggagcatggctggtagcacgggagttcatgacactgttgtcaaccagttgctgtccaaaattgatggcgtggagcagctaaacaacatcctagtcattggaatgaccaatagaccagatctgatagatgaggctcttcttagacctggaagactggaagttaaaatggagataggcttgccagatgagaaaggccgactacagattcttcacatccacacagcaagaatgagagggcatcagttactctctgctgatgtagacattaaagaactggccgtggagaccaagaatttcagtggtgctgaattggagggtctggtgcgagcagcccagtccactgctatgaatagacacataaaggccagtactaaagtggaagtggacatggagaaagcagaaagcctgcaagtgacgagaggagacttccttgcttctttggagaatgatatcaaaccagcctttggcacaaaccaagaagattatgcaagttacattatgaacggtatcatcaaatggggtgacccagttactcgagttctagatgatggggagctgctggtgcagcagactaagaacagtgaccgcacaccattggtcagcgtgcttctggaaggccctcctcacagtgggaagactgctttagctgcaaaaattgcagaggaatccaacttcccgttcatcaagatctgttctcctgaaaaaatgattggcttttctgaaacagccaaatgtcaggccatgaagaagatctttgatgatgcgtacaaatcccagctcagttgtgtggttgtggatgacattgagagattgcttgattacgtccctattggccctcgattttcaaatcttgtattacaggctcttctcgttttactgaaaaaggcacctcctcagggccgcaagcttcttatcattgggaccactagccgcaaagatgtccttcaggagatggaaatgcttaacgctttcagcaccaccatccacgtgcccaacattgccacaggagagcagctgttggaagctttggagcttttgggcaacttaaaggataaggaacgcaccacaattgcacagcaagtcaaagggaagaaggtctggataggaatcaagaagttactaatgctgatcgagatgtccctacagatggatcctgaataccgtgtgagaaaattcttggccctcttaagagaagaaggagctagcccccttgattttgattgaaaatgaactatttgaaacacacagtgaccatgggaagtgaccaaggtgaggatggcctaggatcttcactgtcttactcaagatactggactaagtggaacgttctctaccttcaacatgtgctcgctctgcatgattagtgcaataaaactcccttccttatgcatactgagatagcttagtgtctcgtggaaggtgtcaatttggtttagaatgctgcgcttaccttcccatgcaggctaaagtgattccttcttgctcagtccctctgggtgggaaccatccagtacttgtggacactacacgtttcaacctctctactagcaccatcacccttgataactctcagtcagtgtcatgaatgttgcatgacaacagttggccgattagaaggcagactttctacatgcaaatctggcttagtaaatcgaggtgtgggccagagatcctctgacagctgtcctgagctaacactaaaagtcactgggtatttggttaaaggtctcccacaagactggtattctctttgcctgaagaaacaaggcattgaatctctaaaatgctgttctcaatcattgtcagagatgttttcaagttgcagtcagaagatctttcttaatagaaagtcagatgactaccgtgttggttgtgacttccccttaagtataactaatttgctctgtgggtaagagatatgctcattattaccacttagaagatgttgttaaaaacatgtgaaagataggtatggaaaaagcatacacccccaaacagaaaggagttattaaagtaatttacaaacctctcagcactaattagtgtccaactccaagtgggtcaattccttagtataatattaaggcttactagtatcactgctttttccttagcttaatgacttacttaggaatttatcctttattttaaatgatctggtactatctagtggcctaaaacacctattctccagnaaaatccaatccattttcctagccccttt

SEQ ID NO: 130 - protein, 739 aa, Homo sapiens
MQAARCPTDELSLTNCSVVNEKDFQSGQHVIVRTSPNHRYTFTLKTHPSVVPGSIAFSLPQRKWAGLSIGQEIEVSLYTFDKAKQCIGTMTIEIDFLQKKSNDSNPYDTDKMAAEFIQQFNNQAYSVGQQLVFSFNEKLFGLLVKDIESMDPSILKGEPATGKRQKIEVGLVVGNSQVAFEKAENSSLNLIGKAKTKENRQSIINPDWNFEKMGIGGLDKEFSDIFRRAFAFRVFPPEIVEQMGCIHVKGILLYGPPGCGKTLLARQIGKMLNAREPKVVNGPEILNKYVGESEANIRKLFADAEEEQRRLGANSGLHIIIFDEIDAICKQRGSMAGSTGVHDTVVNQLLSKIDGVEQLNNILVIGMTNRPDLIDEALLRPGRLEVKMEIGLPDEKGRLQILHIHTARMRGHQLLSADVDIKELAVETKNFSGAELEGLVRAAQSTAMNRHIKASTKVEVDMEKAESLQVTRGDFLASLENDIKPAFGTNQEDYASYIMNGIIKWGDPVTRVLDDGELLVQQTKNSDRTPLVSVLLEGPPHSGKTALAAKIAEESNFPFIKICSPEKMIGFSETAKCQAMKKIFDDAYKSQLSCVVVDDIERLLDYVPIGPRFSNLVLQALLVLLKKAPPQGRKLLIIGTTSRKDVLQEMEMLNAFSTTIHVPNIATGEQLLEALELLGNLKDKERTTIAQQVKGKKVWIGIKKLLMLIEMSLQMDPEYRVRKFLALLREEGASPLDFD

SEQ ID NO: 131 - DNA, 3731 bp, Mus musculus
  CDS (44)..(2275)
agagtgcggagctgcaacctgggagccggacgtgtccgcgaagatggcgggccggactatgcaagctgcgagatgccctactgatgaattatctttaagcaactgtgcggttgtgaacgaaaaagatttccagtctggccagcatgtgatggtgaggacgtcccccaatcacaagcacatatttacgctgaggacccatccgtcagtggttccaggatgcatcgcgttcagcttgcctcagcgaaaatgggctggactttctattggacaggacatagaagttgccttgtattcgtttgacaaagccaagcagtgcatcggcacaatgaccatcgagatcgacttcctgcagaagaagaacatcgactccaacccttacgacaccgacaagatggccgccgagttcatccagcagttcaacaaccaggccttctcagtggggcagcagcttgtctttagcttcaatgataagctctttggattactggtgaaggacattgaagccatggatcccagcatcctgaagggagagcctgcatcaggcaaaaggcagaagattgaggtaggcctggttgttggaaacagtcaagttgcatttgaaaaagcagaaaattcgtcgctcaatcttatcggcaaagctaaaaccaaggaaaatcgccagtccatcatcaatcccgactggaactttgagaaaatggggatcggcggtctggataaggggttctcggacattttccgaagagcatttgcttctcgggtgttccccccggagatcgtggaacagatgggttgcaaacatgttagaggcatcctgttatacggaccccctggttgtggtaaaactctcttggctcgacagattggcaagatgctgaatgcgagagagcccaaggtggtcaatgggccagaaatccttaacaagtatgtgggagaatcagaggctaacattcgtaaactctttgctgatgccgaagaggagcaaaggaggcttggtgctaacagtggcttgcacatcatcatctttgatgaaatcgatgccatctgcaagcagagagggagcatggccggcagcactggagtgcatgacaccgtggtcaaccagctgctgtccaagatcgatggcgttgagcagctgaacaacatcctcgttatcggaatgaccaatagaccagatttgatagacgaagctctccttcgacccggaagactggaagttaaaatggagataggcttgccagatgagaagggtcgactccagatccttcatatccacacagcaaggatgagagggcaccagttactgtctgcagatgtggacatcaaggagctggctgtggagactaagaatttcagtggcgctgagctggagggtctggtgcgagcagcgcagtccacagccatgaacagacatatcaaggccagcaccaaagtagaagtagacatggagaaggcagagagcctgcaggtgacaagaggggacttccttgcttccctggagaacgatatcaaaccagcatttggcaccaaccaagaggattatgcaagttacattatgaatgggatcatcaagtggggtgaccccgtgacccgagtcctagatgacggagagctgctggtccagcaaacgaaaaacagtgaccggacaccactcgttagtgtcctcctagaagggcctcctcacagcgggaagactgccctggctgcaaagattgccgaggaatccaacttccccttcatcaagatctgctcacctgataagatgattggcttctccgagacagccaagtgtcaggccatgaagaagatctttgatgatgcttacaaatctcagctcagctgtgtggtcgtggatgacattgagaggctgctcgattatgtccccattggtccccggttctccaacctggtattgcaggctcttcttgtgttactgaaaaaggcgcctcctcagggccgcaagcttcttatcatcgggaccaccagccgcaaagatgtcctgcaggaaatggagatgctgaacgccttcagcaccaccatccacgtgcccaacattgccacaggagagcagctgctggaagctctggagcttttgggcaacttcaaagataaggaacgcaccacaattgctcagcaagtcaaagggaagaaagtctggataggaatcaagaagttactaatgttgattgagatgtccctgcagatggatcctgagtaccgtgtgaggaaattcttggccctcatgagagaagaaggcgctagtcccctggactttgattgaaaacggactgtttacaacagtgaccaagggaagcgaccaaggtgcagatggcctgggatcgtcactcctcacactcaagacactggactacgtgaagtgtccgcctctctccacacactcgctctgcatgactagtgcagtgaactccctcgtgcttttgagatgttctcgtgttccctggactgctgggcttccctcccgtgctagctaagatggttcctgcttatgtgggaggcatgtcacacccgtgcacgctgcccacaccgcgatccctaccacctgcccgaaggtcaacttctacatgagaccaagagcaaaggtagaggttccaagggagtcccttggcgctccccatgctaacagctgtgtatcccgcagattaggtcattgtctgttcctaaagaactaggctttgaatatctaagatgctgttctcaatcattttcagagatatttccaagttgcaatcaggagagcttttctaatcggaagtcaaatcattcctggggtggctgtgatatgctctgagtgtaattaatttgctctgtggtaagagatatgctaatcattgccacttggtagatgccgttaaaaccttatgaaagatacatatggaaatctgtacatccctaaacagaaaaaaaattaaaataatttacaagcctctcaattctaattagcgtccggctctaagtgggtcagttccttaggatgacgttagaggcctattagtgccatcgtcttccttttcctcagcctgatgacttacaattcatcctccttgtatctcaagtgatctgtagtgtctgcagcacataaataaaacactactctccagcagaacaagccaccccctagtcctctccctcagccctcgaatatccattccagcgtactcaacacacctcttcccgaagaggaactcagcgagccctttggagggtggtttgcctaatcagtgggttagaaggaatgcaattaggtcgtcacgtcattcgtggagatgagtcttagggcgcatgccactctccccgctgctgcttcaaacacaaagacagccatcagaagccgcccgggaggcttgctgccacaggggcacctgggtgatactctgacactgtccccacagtagaaggcaaatcatctcctagtcttgccgtctgtataccttgtttggggttttcatccctggcttattttgtggctttgaaagagtgaattgtgttgtgaaactgtgattcccgtggctagtaccgtggttccctgtccaccaccgtggtccctgttgtctgcagttctgcctttctcctcccaacaaagtcctacatgaattaatttatgtttcttgttcaacgaagttaatgtcttgtgtttttgtccaaaattatattgaaaaagatattatattgtgtaatgcaaattgaaggaatgcaataaagagtaaatatacttg

SEQ ID NO: 132 - protein, 744 aa, Mus musculus
MAGRTMQAARCPTDELSLSNCAVVNEKDFQSGQHVMVRTSPNHKHIFTLRTHPSVVPGCIAFSLPQRKWAGLSIGQDIEVALYSFDKAKQCIGTMTIEIDFLQKKNIDSNPYDTDKMAAEFIQQFNNQAFSVGQQLVFSFNDKLFGLLVKDIEAMDPSILKGEPASGKRQKIEVGLVVGNSQVAFEKAENSSLNLIGKAKTKENRQSIINPDWNFEKMGIGGLDKGFSDIFRRAFASRVFPPEIVEQMGCKHVRGILLYGPPGCGKTLLARQIGKMLNAREPKVVNGPEILNKYVGESEANIRKLFADAEEEQRRLGANSGLHIIIFDEIDAICKQRGSMAGSTGVHDTVVNQLLSKIDGVEQLNNILVIGMTNRPDLIDEALLRPGRLEVKMEIGLPDEKGRLQILHIHTARMRGHQLLSADVDIKELAVETKNFSGAELEGLVRAAQSTAMNRHIKASTKVEVDMEKAESLQVTRGDFLASLENDIKPAFGTNQEDYASYIMNGIIKWGDPVTRVLDDGELLVQQTKNSDRTPLVSVLLEGPPHSGKTALAAKIAEESNFPFIKICSPDKMIGFSETAKCQAMKKIFDDAYKSQLSCVVVDDIERLLDYVPIGPRFSNLVLQALLVLLKKAPPQGRKLLIIGTTSRKDVLQEMEMLNAFSTTIHVPNIATGEQLLEALELLGNFKDKERTTIAQQVKGKKVWIGIKKLLMLIEMSLQMDPEYRVRKFLALMREEGASPLDFD

SEQ ID NO: 133 - DNA, 1717 bp, Mus musculus
  CDS (218)..(1474)
  unsure 1288..1301: n=A or C or G or T
ctcgtagcggccaacgtacggatagctccggggaagcttgcgggcgacgcgcacagccacgacggagcagccgcgggactggccgcccagcgccccgttcgccgccgtgccgttccccggcgcgctcaccccgttttcgggatgggagtgtagtggcggcgcggactcggcggggatcgcggcggaggcggcagcggcggcggccgagcgcggctccatgttttccccgggccaggaggaacccagcgcccccaacaaggagccggtgaaatacagggagctggtggtcctggggtacaatggtgctttacctaatggtgacaggggcaagaagaaaagcagatttaccctctataagcggacctacgccagtggtgtcaaacccagcacaatccacatggtctccacaccacaggcgtccaaggccatcagctccagaggacatcacagcatatcgtacacgttgtcacggagccagacggtagtggtggagtacacacacgataaagacacagacatgtttcaggtgggcaggtcaacagaaagccccattgacttcgtggtcacagacacggtttccggcggtcagaacgaagatgcccagatcacacagagcaccatctctaggttcgcatgcaggatcgtgtgtgacaggaacgagccatacacagcacgcatattcgcggcaggattcgattcttccaaaaatatctttcttggagagaaagcagcaaaatggaaaaaccctgatggacacatggatggactcactaccaacggtgtcctggtgatgcacccgcaaggaggcttcaccgaggaatcccagcctggagtctggagagagatctctgtctgtggggatgtatacaccttgcgagagaccaggtcggcccagcagaggggaaagctggtggaaagtgagaccaacgtcctgcaagacggctccctcattgacctgtgtggggccactctcctctggagaaccgcagatggcctttttcacgctcctactcagaagcacatagaagccctccggcaggagatcaatgcagcccgaccccagtgccccgtgggccttaacaccctggccttccccagcatcaaccggaaggaagtggtggaagagaagcagccctgggcatacctgagctgcggccatgtgcacggctaccaccactggggccatcggagcgacacggaagccaacgagagggagtgtcccatgtgcatgactgtgggcccctacgtccctctctggctgggctgtgaggcaggattttatgtcgannnnnnnnnnnnnnctcatgttttcaccccctgcgggcacgtctgttcagagaagtctgccaagtactggtcgcagatcccactgccccacggaacgcacgcgtttcacgccgcctgtccgttctgcgccacgcagctggttggtgaacagaactgcatcaaattgattttccaaggtccagtggactgacaccctggacggccatctccacggcattaacacgttactgtgaagattccgccactaactgtagattctacctttttgtaatgctgtttgttaaggggaaggcggactgggttgggaaatgggggctggtgacgaaatgtggcaggcgctgacagataccactgtgttttgcatgctcagaacagcagcatcagcatcgtcactgaggtctgcctgattaaactttaatacctgtgtaat

SEQ ID NO: 134 - protein, 419 aa, Mus musculus
  UNSURE 357..362: unknown
MFSPGQEEPSAPNKEPVKYRELVVLGYNGALPNGDRGKKKSRFTLYKRTYASGVKPSTIHMVSTPQASKAISSRGHHSISYTLSRSQTVVVEYTHDKDTDMFQVGRSTESPIDFVVTDTVSGGQNEDAQITQSTISRFACRIVCDRNEPYTARIFAAGFDSSKNIFLGEKAAKWKNPDGHMDGLTTNGVLVMHPQGGFTEESQPGVWREISVCGDVYTLRETRSAQQRGKLVESETNVLQDGSLIDLCGATLLWRTADGLFHAPTQKHIEALRQEINAARPQCPVGLNTLAFPSINRKEVVEEKQPWAYLSCGHVHGYHHWGHRSDTEANERECPMCMTVGPYVPLWLGCEAGFYVXXXXXXHVFTPCGHVCSEKSAKYWSQIPLPHGTHAFHAACPFCATQLVGEQNCIKLIFQGPVD

SEQ ID NO: 135 - DNA, 5579 bp, Homo sapiens
  CDS (177)..(1436)
cagccacgacggagcagcagcgggactggccgccccgcgcccccttcgccgccgtgcccttccccggcgcgctcaccccgttctcgggatgggattgtagcggcggcgcggactcggcggggatcgcggcggaggcggcggcgtcggcggcggcgtcggcggccgagcggggctccatgttttcccctggccaggaggaacactgcgcccccaataaggagccagtgaaatacggggagctggtggtgctcgggtacaatggtgctttacccaatggagatagaggacggaggaaaagtagatttgccctctacaagcggcccaaggcaaatggtgtcaaacccagcaccgtccatgtgatatccacgccccaggcatccaaggctatcagctgcaaaggtcaacacagtatatcctacactttgtcaaggaatcagactgtggtggtggagtacacacatgataaggatacggatatgtttcaggtgggcagatcaacagaaagccctatcgacttcgttgtcacagacacgatttctggcagccagaacacggacgaagcccagatcacacagagcaccatatccaggttcgcctgcaggatcgtgtgcgacaggaatgaaccttacacagcacggatattcgccgccggatttgactcttccaaaaacatatttcttggagaaaaggcagcaaagtggaaaaaccccgacggccacatggatgggctcactactaatggcgtcctggtgatgcatccacgagggggcttcaccgaggagtcccagcccggggtctggcgcgagatctctgtctgtggagatgtgtacaccttgcgagaaaccaggtcggcccagcaacgaggaaagctggtggaaagtgagaccaacgtcctgcaggacggctccctcattgacctgtgtggggccactctcctctggagaacagcagatgggctttttcatactccaactcagaagcacatagaagccctccggcaggagattaacgccgcccggcctcagtgtcctgtggggctcaacaccctggccttccccagcatcaacaggaaagaggtggtggaggagaagcagccctgggcatatctcagttgtggccacgtgcacgggtaccacaactggggccatcggagtgacacggaggccaacgagagggagtgtcccatgtgcaggactgtgggcccctatgtgcctctctggcttggctgtgaggcaggattttatgtagacgcaggaccgccaactcatgctttcactccctgtggacacgtgtgctcggagaagtctgcaaaatactggtctcagatcccgttgcctcatggaactcatgcatttcacgctgcttgccctttctgtgctacacagctggttggggagcaaaactgcatcaaattaattttccaaggtccaattgactgacgcccttgacagccatctacgactttattaacaggttactgtgaagattttgccactaactctagattttacctttttgtaatgctgtttatcagaggagggtgacaggggctggaaataaagagaggggacatggtgatgaaacatggcaggagtgtaacagataccagtggtgtgttgcatgctcaaaacagcagcgtcgtcattgaagtctgcttgatccaaccataatatctttgtaataattggatttaaaatgctatgcttctatttttaaccttgggtttttaaccaagtttttttttttttttgtaatcttggacaagactttaaatcatattttacagatgtagaagaaatttattcaaaagtgtgggctcatgaagttcacttcagtgcagtgtggtgtaggtgttacgcgaagggcgcacagtgtctagaaatacttgatcgtggctcaaacctgaccagacagcagaggggcggctctgtacagtgtgactggtggacagatggccttaggcacaggtggttttgaaatctggggctttttctgatttatttttctgacttgttgggggagagaatattcataacttgtgggctttttttttttttaacttcagtggaatttactttagatattcattcatcaaatacatgggacttcacaaacaattttccataactttttagcctgtcttttgttatttctgcctaatatgatttgccccgatactcatcttgcacggccagaactgtttggttgattaaaatacatcagctcttaaaaactcattaactgagggtaattacagtagtagacatggtctgggtactatactaccatgtttatttgctgactgaattaagatttaagaatgattaaaaataagcttttactttttaaaaccacttgaggtttcataaagcttggggtttttttttttcctttgttaagaaagccaaccaatcacaatgatatagtcattgttgtgcactcccttttcaccatctgtcaccttcccttgcagcttaaggagcccagtaagttttgaaaatgtttgcgaatcaaactaaatttaagtgggatgattagatatacacaacaccaagtggtacatctgcagagataattcaaaattcctgcttttgagagagcaaatgagtgtttgctgaggaataattaaatgagaatttcataggagctccaccattcctgttactttcatttcattttgattaataattcttggatgcttggcatcgatcgtatcactgctcctagaaggtaaagatcctttaggacatgagactggtagaagctggctgagataaaataagtatttatttaaactaatgttctcttaatttgaccattgcagatttgggtgacttttttttaacctttgtacatatacgtaatttatatgattctaatgtactatatccatacttgaattggttttttcgtattttgcctactggcaaatattttgcctattttcagtcgttctaacctatttgaatacgcttttccttaaagtgatacgataatattactcttgattgctgctgcttaatttgatgtaatatgtttaaagttcagcctctcagttttaatatagctttatttttcagtggagatcattgtttaggatgagacatttttggttttggttttgtttgggtaaattttaaatggtgtgaaaatcgatgacaacagtcctcttacagatagcttgctgtattctgtatagcttactctacctgcagacagaaaatgaaagaaaaaaatggacttgcctagaataatatattgaatgccttttgatttagccagagtctctgatgattagctttcgctgatagagtatgtcttttcagcctgtaattctttgggccccaaagaatgacaaaggaggcactcgttctcttttcttgctgtatgcctagaaagtggttgaaggattcttgatgccctaaaaccatcttgtaagctaaatggtcttgcatccagaaaggccagattttacctaccaagaaaaaaagatatttttccagagagttaggtatatcataattttccatttcaagtcctgtttataagtctagtcattctgcaacgtgacatatcccccaaaatgaagttaccttccaagttggacacgtcccgtagttgggcatatgtctaactaaaagtttctgacttttagtaaattcagcttaaatataagttgaaatttgggaaataatttccaagctcttggaaggggtaacagtgaaccgccctccatgggctccacatcttttcctttggcttccaaagtcaggtcccgcccaccctgcctaaggaactgcagagaggtggcaaatcagcaaaaaggacaccaggctcttcttggccacttgtaggaagatccctttacaattttgactaaggagattttttttttcacagttgagttagtttgtgaaaataaagaactctgtagctcaccaaggtggagaaacgcaattcagaaaagtaatttctccaaggtcacttctttttttatgtcttgccatcactttaaaggactagccccactcccccatgtgtatacacaaggaaattgcagaccaattagttgtcttggcctgactctaatgccttttgcaagtagctttccagaagtaaaagtcccagtgatgtattcccatagaaatatttttcagttgtttatgtcgtttactacaaaaaaaaagattcagagtggatggagtacaactctgagtatttttctagtccggaattttttattaataatcggtgctgccgggtcatgcatgctgcaactctcaacatttcccttatttggttcagcttttagcaaaaagggctacagttcaccctgcagagtattaaggtttctggatttttttctcccaactgtggcccaaaagaattaaaatctgttaatataaatagagaacatatttatcattcctcgatagttaattatagactttggtacctttgtgcctcagggaagccacgtgatataactggttatagaatttcagggttagggtttaaagaaaggagaaagccattggaaaaatgatgggctccattaaggagactaatgaatctggatgcagaaatatgtcagaaactggcataaacatgattgtagtagaatttattttccagtaccaatagggaaattattttaagttattacatttactgtattgggaaacttgaggagaactctttagttcataaagcttcaatgtctttttttttttttttcatggaaaaactcaaacctctgttatttgggagctcagtattgtgtggacacttacgagagttttctgcttaattgaagtgtaatataggttgtagaattgttacctgcagttctatggttttgtttcacttcttttcttttttaaagccattctgttctttggatgtgcttgaaagggtgtgtgattacaccattgttaatgctgggtaaaaactatcttcttgcagccttgcctcataacagtggaatttctgatagacaaaccacaggactttgattttaagccaaatccatctccatccctttactgtcaatcttctgtcccagtagtttagcctttgtggcttaggttatgatgcgcctccttctgtgcgaccaatgagacgacttcagcatctttttaaaataatctaagcatcattgaagcagtaacacaaaaaaaaggttcagtattttctttttagtataacttacatcctttcaaataagtctttgccctcatgaagaatccctagaggaagataaggaaaataagtattttccagttttgcttgacagtttctaaacaaacaaaaataaactcaatgaaaggaaagatgtttctttttagctgagatgacagattgcttctctgtattaaatagtctagaagttaaggggatggtcacatttaccatgtattgtgttattagcagttaaattttatgaatatgtttgtaaaattgttgttttatatttcatgtcaaattgaaaagtttatttcttcactattgtacctgtggaaatacaagccattttacaggaaaaaatcttcaaaaactattaaatggatatcagcctg

SEQ ID NO: 136 - protein, 420 aa, Homo sapiens
MFSPGQEEHCAPNKEPVKYGELVVLGYNGALPNGDRGRRKSRFALYKRPKANGVKPSTVHVISTPQASKAISCKGQHSISYTLSRNQTVVVEYTHDKDTDMFQVGRSTESPIDFVVTDTISGSQNTDEAQITQSTISRFACRIVCDRNEPYTARIFAAGFDSSKNIFLGEKAAKWKNPDGHMDGLTTNGVLVMHPRGGFTEESQPGVWREISVCGDVYTLRETRSAQQRGKLVESETNVLQDGSLIDLCGATLLWRTADGLFHTPTQKHIEALRQEINAARPQCPVGLNTLAFPSINRKEVVEEKQPWAYLSCGHVHGYHNWGHRSDTEANERECPMCRTVGPYVPLWLGCEAGFYVDAGPPTHAFTPCGHVCSEKSAKYWSQIPLPHGTHAFHAACPFCATQLVGEQNCIKLIFQGPID

SEQ ID NO: 137 - DNA, 4021 bp, Homo sapiens
  CDS (91)..(3651)
gaaaaggtaagggggagcgagagcgccagagagagaagatcggggggctaaaatccatcttcatcctaccgctccgcccgtgttggtggaatgagcgttgcatgtgtcttgaagagaaaagcagtgctttggcaggactctttcagcccccacctgaaacatcaccctcaagaaccagctaatcccaacatgcctgttgttttgacatctggaacagggtcgcaagcgcagccacaaccagctgcaaatcaggctcttgcagctgggactcactccagccctgtcccaggatctataggagttgcaggccgttcccaggacgacgctatggtggactacttctttcagaggcagcatggtgagcagcttgggggaggaggaagtggaggaggcggctataataatagcaaacatcgatggcctactggggataacattcatgcagaacatcaggtgcgttccatggatgaactgaatcatgattttcaagcacttgctctggagggaagagcgatgggagagctcttgccaggtaaaaagttttgggaaacagatgaatccagcaaagatggaccaaaaggaatattcctgggtgatcaatggcgagacagtgcctggggaacatcagatcattcagtttcccagccaatcatggtgcagagaagacctggtcagagtttccatgtgaacagtgaggtcaattctgtactgtccccacgatcggagagtgggggactaggcgttagcatggtggagtatgtgttgagctcatccccgggcgattcctgtctaagaaaaggaggatttggcccaagggatgcagacagtgatgaaaacgacaaaggtgaaaagaagaacaagggtacgtttgatggagataagctaggagatttgaaggaggagggtgatgtgatggacaagaccaatggtttaccagtgcagaatgggattgatgcagacgtcaaagattttagccgtacccctggtaattgccagaactctgctaatgaagtggatcttctgggtccaaaccagaatggttctgagggcttagcccagctgaccagcaccaatggtgccaagcctgtggaggatttccccaacatggagtcccagagtgtccccttggaccccatggaacatgtgggcatggagcctcttcagtttgattattcaggcacgcaggtacctgtggactcagcagcagcaactgtgggactttttgactacaattctcaacaacagctgttccaaagacctaatgcgcttgctgtccagcagttgacagctgctcagcagcagcagtatgcactggcagctgctcatcagccgcacatcggttcagctcccgctgcgtttgtccccaatccatacatcatcagtgctgctcccccagggacggacccctacacagctggattggctgcagcagcgacactaggcccagctgtggtccctcaccagtattatggagttactccctggggagtctaccctgccagtcttttccagcagcaagctgccgctgccgctgcagcaactaattcagctaatcaacagaccaccccacaggctcagcaaggacagcagcaggttctccgtggaggagccagccaacgtcctttgaccccaaaccagaaccagcagggacagcaaacggatccccttgtggcagctgcagcagtgaattctgcccttgcatttggacaaggtctggcagcaggcatgccaggttatccggtgttggctcctgctgcttactatgaccaaactggtgcccttgtagtgaatgcaggcgcgagaaatggtcttggagctcctgttcgacttgtagctcctgccccagtcatcattagttcctcagctgcacaagcagctgttgcagcagccgcagcttcagcaaatggagcagctggtggtcttgctggaacaacaaatggaccatttcgccctttaggaacacagcagcctcagccccagccccagcagcagcccaataacaacctggcatccagttctttctacggcaacaactctctgaacagcaattcacagagcagctccctcttctcccagggctctgcccagcctgccaacacatccttgggattcggaagtagcagttctctcggcgccaccctgggatccgcccttggagggtttggaacagcagttgcaaactccaacactggcagtggctcccgccgtgactccctgactggcagcagtgacctttataagaggacatcgagcagcttgacccccattggacacagtttttataacggccttagcttttcctcctctcctggacccgtgggcatgcctctccctagtcaggggccaggacattcacagacaccacctccttccctctcttcacatggatcctcttcaagcttaaacctgggaggactcacgaatggcagtggaagatacatctctgctgctccaggcgctgaagccaagtaccgcagtgcaagcagcgcctccagcctcttcagcccgagcagcactcttttctcttcctctcgtttgcgatatggaatgtctgatgtcatgccttctggcaggagcaggcttttggaagattttcgaaacaaccggtaccccaatttacaactgcgggagattgctggacatataatggaattttcccaagaccagcatgggtccagattcattcagctgaaactggagcgtgccacaccagctgagcgccagcttgtcttcaatgaaatcctccaggctgcctaccaactcatggtggatgtgtttggtaattacgtcattcagaagttctttgaatttggcagtctcgaacagaagctggctttggcagaacggattcgaggccacgtcctgtcattggcactacagatgtatggctgccgtgttatccagaaagctcttgagtttattccttcagaccagcaggtaattaatgagatggttcgggaactagatggccatgtcttgaagtgtgtgaaagatcagaatggcaatcacgtggttcagaaatgcattgaatgtgtacagccccagtctttgcaatttatcatcgatgcgtttaagggacaggtatttgccttatccacacatccttatggctgccgagtgattcagagaatcctggagcactgtctccctgaccagacactccctattttagaggagcttcaccagcacacagagcagcttgtacaggatcaatatggaaattatgtaatccaacatgtactggagcacggtcgtcctgaggataaaagcaaaattgtagcagaaatccgaggcaatgtacttgtattgagtcagcacaaatttgcaagcaatgttgtggagaagtgtgttactcacgcctcacgtacggagcgcgctgtgctcatcgatgaggtgtgcaccatgaacgacggtccccacagtgccttatacaccatgatgaaggaccagtatgccaactacgtggtccagaagatgattgacgtggcggagccaggccagcggaagatcgtcatgcataagatccggccccacatcgcaactcttcgtaagtacacctatggcaagcacattctggccaagctggagaagtactacatgaagaacggtgttgacttagggcccatctgtggcccccctaatggtatcatctgaggcagtgtcacccgctgttccctcattcccgctgacctcactggcccactggcaaatccaaccagcaaccagaaatgttctagtgtagagtctgagacgggcaagtggttgccccaggattactccctcctccaaaaaaggaatcaaatccacgagtggaaaagcctttgtaaatttaattttattacacataacatgtactattttttttaattgactaattgccttgctgttttactggtgtataggatacttgtacataggtaaccaatgtacatgggaggccacatattttgttcactgttgtatctatatttcacatgtggaaactttcagggtggttggtttaacaaaaaaaaaaagcttt

SEQ ID NO: 138 - protein, 1187 aa, Homo sapiens
MSVACVLKRKAVLWQDSFSPHLKHHPQEPANPNMPVVLTSGTGSQAQPQPAANQALAAGTHSSPVPGSIGVAGRSQDDAMVDYFFQRQHGEQLGGGGSGGGGYNNSKHRWPTGDNIHAEHQVRSMDELNHDFQALALEGRAMGELLPGKKFWETDESSKDGPKGIFLGDQWRDSAWGTSDHSVSQPIMVQRRPGQSFHVNSEVNSVLSPRSESGGLGVSMVEYVLSSSPGDSCLRKGGFGPRDADSDENDKGEKKNKGTFDGDKLGDLKEEGDVMDKTNGLPVQNGIDADVKDFSRTPGNCQNSANEVDLLGPNQNGSEGLAQLTSTNGAKPVEDFPNMESQSVPLDPMEHVGMEPLQFDYSGTQVPVDSAAATVGLFDYNSQQQLFQRPNALAVQQLTAAQQQQYALAAAHQPHIGSAPAAFVPNPYIISAAPPGTDPYTAGLAAAATLGPAVVPHQYYGVTPWGVYPASLFQQQAAAAAAATNSANQQTTPQAQQGQQQVLRGGASQRPLTPNQNQQGQQTDPLVAAAAVNSALAFGQGLAAGMPGYPVLAPAAYYDQTGALVVNAGARNGLGAPVRLVAPAPVIISSSAAQAAVAAAAASANGAAGGLAGTTNGPFRPLGTQQPQPQPQQQPNNNLASSSFYGNNSLNSNSQSSSLFSQGSAQPANTSLGFGSSSSLGATLGSALGGFGTAVANSNTGSGSRRDSLTGSSDLYKRTSSSLTPIGHSFYNGLSFSSSPGPVGMPLPSQGPGHSQTPPPSLSSHGSSSSLNLGGLTNGSGRYISAAPGAEAKYRSASSASSLFSPSSTLFSSSRLRYGMSDVMPSGRSRLLEDFRNNRYPNLQLREIAGHIMEFSQDQHGSRFIQLKLERATPAERQLVFNEILQAAYQLMVDVFGNYVIQKFFEFGSLEQKLALAERIRGHVLSLALQMYGCRVIQKALEFIPSDQQVINEMVRELDGHVLKCVKDQNGNHVVQKCIECVQPQSLQFIIDAFKGQVFALSTHPYGCRVIQRILEHCLPDQTLPILEELHQHTEQLVQDQYGNYVIQHVLEHGRPEDKSKIVAEIRGNVLVLSQHKFASNVVEKCVTHASRTERAVLIDEVCTMNDGPHSALYTMMKDQYANYVVQKMIDVAEPGQRKIVMHKIRPHIATLRKYTYGKHILAKLEKYYMKNGVDLGPICGPPNGII

SEQ ID NO: 139 - DNA, 5359 bp, Homo sapiens
  CDS (96)..(3653)
gggggtgaaaggtaagggggagcgagagcgccagagagagaagatcggggggctgaaatccatcttcatcctaccgctccgcccgtgttggtggaatgagcgttgcatgtgtcttgaagagaaaagcagtgctttggcaggactctttcagcccccacctgaaacatcaccctcaagaaccagctaatcccaacatgcctgttgttttgacatctggaacagggtcgcaagcgcagccacaaccagctgcaaatcaggctcttgcagctgggactcactccagccctgtcccaggatctataggagttgcaggccgttcccaggacgacgctatggtggactacttctttcagaggcagcatggtgagcagcttgggggaggaggaagtggaggaggcggctataataatagcaaacatcgatggcctactggggataacattcatgcagaacatcaggtgcgttccatggatgaactgaatcatgattttcaagcacttgctctggagggaagagcgatgggagagcagctcttgccaggtaaaaagttttgggaaacagatgaatccagcaaagatggaccaaaaggaatattcctgggtgatcaatggcgagacagtgcctggggaacatcagatcattcagtttcccagccaatcatggtgcagagaagacctggtcagagtttccatgtgaacagtgaggtcaattctgtactgtccccacgatcggagagtgggggactaggcgttagcatggtggagtatgtgttgagctcatccccgggcgattcctgtctaagaaaaggaggatttggcccaagggatgcagacagtgatgaaaacgacaaaggtgaaaagaagaacaagggtacgtttgatggagataagctaggagatttgaaggaggagggtgatgtgatggacaagaccaatggtttaccagtgcagaatgggattgatgcagacgtcaaagattttagccgtacccctggtaattgccagaactctgctaatgaagtggatcttctgggtccaaaccagaatggttctgagggcttagcccagctgaccagcaccaatggtgccaagcctgtggaggatttctccaacatggagtcccagagtgtccccttggaccccatggaacatgtgggcatggagcctcttcagtttgattattcaggcacgcaggtacctgtggactcagcagcagcaactgtgggactttttgactacaattctcaacaacagctgttccaaagacctaatgcgcttgctgtccagcagttgacagctgctcagcagcagcagtatgcactggcagctgctcatcagccgcacatcggtttagctcccgctgcgtttgtccccaatccatacatcatcagcgctgctcccccagggacggacccctacacagctggattggctgcagcagcgacactaggcccagctgtggtccctcaccagtattatggagttactccctggggagtctaccctgccagtcttttccagcagcaagctgccgctgccgctgcagcaactaattcagctaatcaacagaccaccccacaggctcagcaaggacagcagcaggttctccgtggaggagccagccaacgtcctttgaccccaaaccagaaccagcagggacagcaaacggatccccttgtggcagctgcagcagtgaattctgcccttgcatttggacaaggtctggcagcaggcatgccaggttatccggtgttggctcctgctgcttactatgaccaaactggtgcccttgtagtgaatgcaggcgcgagaaatggtcttggagctcctgttcgacttgtagctcctgccccagtcatcattagttcctcagctgcacaagcagctgttgcagcagccgcagcttcagcaaatggagcagctggtggtcttgctggaacaacaaatggaccatttcgccctttaggaacacagcagcctcagccccagccccagcagcagcccaataacaacctggcatccagttctttctacggcaacaactctctgaacagcaattcacagagcagctccctcttctcccagggctctgcccagcctgccaacacatccttgggattcggaagtagcagttctctcggcgccaccctgggatccgcccttggagggtttggaacagcagttgcaaactccaacactggcagtggctcccgccgtgactccctgactggcagcagtgacctttataagaggacatcgagcagcttgacccccattggacacagtttttataacggccttagcttttcctcctctcctggacccgtgggcatgcctctccctagtcagggaccaggacattcacagacaccacctccttccctctcttcacatggatcctcttcaagcttaaacctgggaggactcacgaatggcagtggaagatacatctctgctgctccaggcgctgaagccaagtaccgcagtgcaagcagcgcctccagcctcttcagcccgagcagcactcttttctcttcctctcgtttgcgatatggaatgtctgatgtcatgccttctggcaggagcaggcttttggaagattttcgaaacaaccggtaccccaatttacaactgcgggagattgctggacatataatggaattttcccaagaccagcatgggtccagattcattcagctgaaactggagcgtgccacaccagctgagcgccagcttgtcttcaatgaaatcctccaggctgcctaccaactcatggtggatgtgtttggtaattacgtcattcagaagttctttgaatttggcagtcttgaacagaagctggctttggcagaacggattcgaggccacgtcctgtcattggcactacagatgtatggctgccgtgttatccagaaagctcttgagtttattccttcagaccagcagaatgagatggttcgggaactagatggccatgtcttgaagtgtgtgaaagatcagaatggcaatcacgtggttcagaaatgcattgaatgtgtacagccccagtctttgcaatttatcatcgatgcgtttaagggacaggtatttgccttatccacacatccttatggctgccgagtgattcagagaatcctggagcactgtctccctgaccagacactccctattttagaggagcttcaccagcacacagagcagcttgtacaggatcaatatggaaattatgtaatccaacatgtactggagcacggtcgtcctgaggataaaagcaaaattgtagcagaaatccgaggcaatgtacttgtattgagtcagcacaaatttgcaagcaatgttgtggagaagtgtgttactcacgcctcacgtacggagcgcgctgtgctcatcgatgaggtgtgcaccatgaacgacggtccccacagtgccttatacaccatgatgaaggaccagtatgccaactacgtggtccagaagatgattgacgtggcggagccaggccagcggaagatcgtcatgcataagatccggccccacatcgcaactcttcgtaagtacacctatggcaagcacattctggccaagctggagaagtactacatgaagaacggtgttgacttagggcccatctgtggcccccctaatggtatcatctgaggcagtgtcacccgctgttccctcattcccgctgacctcactggcccactggcaaatccaaccagcaaccagaaatgttctagtgtagagtctgagacgggcaagtggttgctccaggattactccctcctccaaaaaaggaatcaaatccacgagtggaaaagcctttgtaaatttaattttattacacataacatgtactattttttttaattgactaattgccctgctgttttactggtgtataggatacttgtacataggtaaccaatgtacatgggaggccacatattttgttcactgttgtatctatatttcacatgtggaaactttcagggtggttggtttaacaaaaaaaaaaagctttaaaaaaaaaagaaaaaaaggaaaaggtttttagctcatttgcctggccggcaagttttgcaaatagctcttccccacctcctcattttagtaaaaaacaaacaaaaacaaaaaaacctgagaagtttgaattgtagttaaatgaccccaaactggcatttaacactgtttataaaaaatatatatatatatatatatatataatgaaaaaggtttcagagttgctaaagcttcagtttgtgacattaagtttatgaaattctaaaaaatgccttttttggagactatattatgctgaagaaggctgttcgtgaggaggagatgcgagcacccagaacgtcttttgaggctgggcgggtgtgattgtttactgcctactggatttttttctattaacattgaaaggtaaaatctgattatttagcatgagaaaaaaaaatccaactctgcttttggtcttgcttctataaatatatagtgtatacttggtgtagactttgcatatatacaaatttgtagtattttcttgttttgatgtctaatctgtatctataatgtaccctagtagtcgaacatacttttgattgtacaattgtacatttgtatacctgtaatgtaaatgtggagaagtttgaatcaacataaacacgttttttggtaagaaaagagaattagccagccctgtgcattcagtgtatattctcaccttttatggtcgtagcatatagtgttgtatattgtaaattgtaatttcaaccagaagtaaatttttttcttttgaaggaataaatgttctttatacagcctagttaatgtttaaaaagaaaaaaatagcttggttttatttgtcatctagtctcaagtatagcgagattctttctaaatgttattcaagattgagttctcactagtgtttttttaatcctaaaaaagtaatgttttgattttgtgacagtcaaaaggacgtgcaaaagtctagccttgcccgagctttccttacaatcagagcccctctcaccttgtaaagtgtgaatcgcccttcccttttgtacagaagatgaactgtattttgcattttgtctacttgtaagtgaatgtaacatactgtcaattttccttgtttgaatatagaattgtaacactacacggtgtacatttccagagccttgtgtatatttccaatgaacttttttgcaagcacacttgtaaccatatgtgtataattaacaaacctgtgtatgcttatgcctgggcaactattttttgtaactcttgtgtagattgtctctaaacaatgtgtgatctttattttgaaaaatacagaactttggaatctg

SEQ ID NO: 140 - protein, 1186 aa, Homo sapiens
MSVACVLKRKAVLWQDSFSPHLKHHPQEPANPNMPVVLTSGTGSQAQPQPAANQALAAGTHSSPVPGSIGVAGRSQDDAMVDYFFQRQHGEQLGGGGSGGGGYNNSKHRWPTGDNIHAEHQVRSMDELNHDFQALALEGRAMGEQLLPGKKFWETDESSKDGPKGIFLGDQWRDSAWGTSDHSVSQPIMVQRRPGQSFHVNSEVNSVLSPRSESGGLGVSMVEYVLSSSPGDSCLRKGGFGPRDADSDENDKGEKKNKGTFDGDKLGDLKEEGDVMDKTNGLPVQNGIDADVKDFSRTPGNCQNSANEVDLLGPNQNGSEGLAQLTSTNGAKPVEDFSNMESQSVPLDPMEHVGMEPLQFDYSGTQVPVDSAAATVGLFDYNSQQQLFQRPNALAVQQLTAAQQQQYALAAAHQPHIGLAPAAFVPNPYIISAAPPGTDPYTAGLAAAATLGPAVVPHQYYGVTPWGVYPASLFQQQAAAAAAATNSANQQTTPQAQQGQQQVLRGGASQRPLTPNQNQQGQQTDPLVAAAAVNSALAFGQGLAAGMPGYPVLAPAAYYDQTGALVVNAGARNGLGAPVRLVAPAPVIISSSAAQAAVAAAAASANGAAGGLAGTTNGPFRPLGTQQPQPQPQQQPNNNLASSSFYGNNSLNSNSQSSSLFSQGSAQPANTSLGFGSSSSLGATLGSALGGFGTAVANSNTGSGSRRDSLTGSSDLYKRTSSSLTPIGHSFYNGLSFSSSPGPVGMPLPSQGPGHSQTPPPSLSSHGSSSSLNLGGLTNGSGRYISAAPGAEAKYRSASSASSLFSPSSTLFSSSRLRYGMSDVMPSGRSRLLEDFRNNRYPNLQLREIAGHIMEFSQDQHGSRFIQLKLERATPAERQLVFNEILQAAYQLMVDVFGNYVIQKFFEFGSLEQKLALAERIRGHVLSLALQMYGCRVIQKALEFIPSDQQNEMVRELDGHVLKCVKDQNGNHVVQKCIECVQPQSLQFIIDAFKGQVFALSTHPYGCRVIQRILEHCLPDQTLPILEELHQHTEQLVQDQYGNYVIQHVLEHGRPEDKSKIVAEIRGNVLVLSQHKFASNVVEKCVTHASRTERAVLIDEVCTMNDGPHSALYTMMKDQYANYVVQKMIDVAEPGQRKIVMHKIRPHIATLRKYTYGKHILAKLEKYYMKNGVDLGPICGPPNGII

SEQ ID NO: 141 - DNA, 3550 bp, Homo sapiens
  CDS (181)..(1401)
actgggcccgggacgcgccggcggcggcggagactccggggctgcggcgccgcccgccccgcccgcagagtccggctgccgcgcatcgtccgcagacgccgccaccgccatgggctcctgaggctagcttgtcactttctgcaaaggtttccctcagggagcctcctgctgccaggcaccatgacagtgaggggggatgtgctggccccggatccagcgtcgcccacgaccgcagcagcctcgcccagcgtctccgtgatccccgagggcagccccactgccatggagcagcctgtgttcctgatgacaactgccgctcaggccatctctggcttcttcgtgtggacggccctgctcatcacatgccaccagatctacatgcacctgcgctgctacagctgccccaacgagcagcgctacatcgtgcgcatcctcttcatcgtgcccatctacgcctttgactcctggctcagcctcctcttcttcaccaacgaccagtactacgtgtacttcggcaccgtccgcgactgctatgaggccttggtcatctataatttcctgagcctgtgctatgagtacctaggaggagaaagttccatcatgtcggagatcagaggaaaacccattgagtccagctgtatgtatggcacctgctgcctctggggaaagacttattccatcggatttctgaggttctgcaaacaggccaccctgcagttctgtgtggtgaagccactcatggcggtcagcactgtggtcctccaggccttcggcaagtaccgggatggggactttgacgtcaccagtggctacctctacgtgaccatcatctacaacatctccgtcagcctggccctctacgccctcttcctcttctacttcgccacccgggagctgctcagcccctacagccccgtcctcaagttcttcatggtcaagtccgtcatctttctttccttctggcaaggcatgctcctggccatcctggagaagtgtggggccatccccaaaatccactcggcccgcgtgtcggtgggcgagggcaccgtggctgccggctaccaggacttcatcatctgtgtggagatgttctttgcagccctggccctgcggcacgccttcacctacaaggtctatgctgacaagaggctggacgcacaaggccgctgtgcccccatgaagagcatctccagcagcctcaaggagaccatgaacccgcacgacatcgtgcaggacgccatccacaacttctcacctgcctaccagcagtacacgcagcagtccaccctggagcctgggcccacctggcgtggtggcgcccacggcctctcccgctcccacagcctcagtggcgcccgcgacaacgagaagactctcctgctcagctctgatgatgaattctaggtgcgggctgcagtggcggaagtgctggcgccatagccacggtcaggctgtgccccacctccagcctcaccaccaggccaggaggcagctggcacagtgctcacgccgcctttatttattggaccagaaacactcacatgtcacttccagaggaacgggggacagccaggctcgcccatgggccttcaggaatatttatacatggcccagcctgcactgcccgggcgagggcagaggacactgggagcaaggcttatgcccctgctgcccgtcctgtgctgggggcatgctgggaccagccgcacccaggccccaatgcttgtgtgtggaccagcggctgcagccttctagcccctcctccccgcgagactctcaggctgaggtcggcaagccgtggctcccccacacaccgtgcaataccctgtctgacctgggctcttcccgcctgcatccctcccctgtccacctttgtccagtgctagattcacctcaccccgggcaggagtggggatgtgggcgctctgtggtcctcccctcctgacccaggcctctgtggcatgctgcaaggatcagagccagacaccaggagtcacaggccccacccaggaagggcattcagggcccctgggcaccgcttctgttgaagcaggggcttctgggcccctgggtatccccacctgtcgtggccacacctctgcctgcctcatgccccttccccctggcctaccaaggacagcccacagcccgcactgccggctcacttgggtccttcctcgatagctttgggcagagcccttgcttcctggctgcttcagggctcaggggctcccagccctccttcccaggctgatgctgggtcctctctctctttggggcttctccctcccgtttcaggggaaaggtctgagtctccacgtttcagaccagcttctgggggaaggcagtccggcagggagaccgggaggggtggccacacagtggggagctgggaggtggggggaatggtcccagactcctctcggggcccctatccacacagggcctggtgttctaccccatctggcccctggcccatctcttctgtgccttagtcacatatgaaagcgcccctccctggctccccatctgtcccacacgctccctggggctcttagttcagctgctggcactcgcaggatcctgcagtgctgggcccagagcccttggacaggcctcaggagtggtcaggaccaccaagcccctcctctccccctccacacctctagacctggggcctccggaacccccagcaggctgggcttatactagctcctgacttaggaagagcctcgtgtcacaacacgtgtccctacaggcaaagtgtcctggcatttaaaacccagattatccctgggtttgggctgcagtcacctggagaagctggtagggtaagggagagggaccctgccggtgttcactggggattctttcttttggtccttcctggaatgaacaggttccctccctgccacctgtgaggagagttggggcccagccgtcttcctggcctccttcctttcctcgtggcagaggcctgcatgtgggtgccagaggccagctctccccctccatcttgggggggcggagcagttgggcccaagctgcccgggagggtgggtgcagacacaggctgaggaccagccctggccctgccccgccatctgctttcaccaagctgtctctccaccgtggcttcccttctccctccaggccaaagtgctgctgattcccactcccttggttttcgcctgcccagcgttgctgtttgcgtggagggtggggggagctcagtggcagggaatcagcggtccgtggggtcgtggggacgggaacatgtgcccgaccgctccatcccctcctcctccttaggatgcataacctaccttgtctttttttttttttaaattttctttccaggtagagtagctctttgtacataaagaatacttgaaaaattaattgtatgatgtatgagaagacagagtctcctagttttgtatcttgttgtatgactgccatgagttccaccagaaagccactctattttggtctctgtgacattttaaatgcgtgacagaagtgagcaaataaagtgaggaagaaatct

SEQ ID NO: 142 - protein, 407 aa, Homo sapiens
MTVRGDVLAPDPASPTTAAASPSVSVIPEGSPTAMEQPVFLMTTAAQAISGFFVWTALLITCHQIYMHLRCYSCPNEQRYIVRILFIVPIYAFDSWLSLLFFTNDQYYVYFGTVRDCYEALVIYNFLSLCYEYLGGESSIMSEIRGKPIESSCMYGTCCLWGKTYSIGFLRFCKQATLQFCVVKPLMAVSTVVLQAFGKYRDGDFDVTSGYLYVTIIYNISVSLALYALFLFYFATRELLSPYSPVLKFFMVKSVIFLSFWQGMLLAILEKCGAIPKIHSARVSVGEGTVAAGYQDFIICVEMFFAALALRHAFTYKVYADKRLDAQGRCAPMKSISSSLKETMNPHDIVQDAIHNFSPAYQQYTQQSTLEPGPTWRGGAHGLSRSHSLSGARDNEKTLLLSSDDEF

SEQ ID NO: 143 - DNA, 3747 bp, Homo sapiens
  CDS (297)..(2189)
ggtgactggctgtgactcaggacccagaggagtagagggagccaggcaggggtccctccacctcggggaagagctggatgggctcttcgggagctcagaaaggctaagccttgagggacggtgacgcagagccgcctgcctgcccgggcctctgcatacctgggatcggggtgaaggacctttgcctcctagaggcctgcctgagccggggctggtggtggaaggctgctgcggcggccccacggtgccccacagcaggaggtgcttcccaaggaccgtagatgcctctctagagcatgagctcaggcaagagtgcccgctacaaccgcttctccggggggcccagcaatcttcccaccccagacgtcaccacagggaccagaatggaaacgaccttcggacccgccttttcagccgtcaccaccatcacaaaagctgacgggaccagcacctacaagcagcactgcaggacaccctcctcctccagcacccttgcctactccccgcgggacgaggaggacagcatggagccactggtgtttgcggagcagccctcggtgaagctgtgctgtcagctctgctgcagcgtcttcaaagaccccgtgatcaccacgtgtgggcacacgttctgtaggagatgcgccttgaagtcagagaagtgtcccgtggacaacgtcaaactgaccgtggtggtgaacaacatcgcggtggccgagcagatcggggagctcttcatccactgccggcacggctgccgggtagcgggcagcgggaagccccccatctttgaggtggacccccgagggtgccccttcaccatcaagctcagcgcccggaaggaccacgagggcagctgtgactacaggcctgtgcggtgtcccaacaaccccagctgccccccgctgctcaggatgaacctggaggcccacctcaaggagtgcgagcacatcaaatgcccccactccaagtacgggtgcacgttcatcgggaaccaggacacttacgagacccacctggagacttgccgcttcgagggcctgaaggagtttctgcagcagacggatgaccgcttccacgagatgcacgtggctctggcccagaaggaccaggagatcgccttcctgcgctccatgctgggaaagctctcggagaagatcgaccagctagagaagagcctggagctcaagtttgacgtcctggacgaaaaccagagcaagctcagcgaggacctcatggagttccggcgggacgcatccatgttaaatgacgagctgtcccacatcaacgcgcggctgaacatgggcatcctaggctcctacgaccctcagcagatcttcaagtgcaaagggacctttgtgggccaccagggccctgtgtggtgtctctgcgtctactccatgggtgacctgctcttcagtggctcctctgacaagaccatcaaggtgtgggacacatgtaccacctacaagtgtcagaagacactggagggccatgatggcatcgtgctggctctctgcatccaggggtgcaaactctacagcggctctgcagactgcaccatcattgtgtgggacatccagaacctgcagaaggtgaacaccatccgggcccatgacaacccggtgtgcacgctggtctcctcacacaacgtgctcttcagcggctccctgaaggccatcaaggtctgggacatcgtgggcactgagctgaagttgaagaaggagctcacaggcctcaaccactgggtgcgggccctggtggctgcccagagctacctgtacagcggctcctaccagacaatcaagatctgggacatccgaacccttgactgcatccacgtcctgcagacgtctggtggcagcgtctactccattgctgtgacaaatcaccacattgtctgtggcacctacgagaacctcatccacgtgtgggacattgagtccaaggagcaggtgcggaccctcacgggccacgtgggcaccgtgtatgccctggcggtcatctcgacgccagaccagaccaaagtcttcagtgcatcctacgaccggtccctcagggtctggagtatggacaacatgatctgcacgcagaccctgctgcgtcaccagggcagtgtcaccgcgctggctgtgtcccggggccgactcttctcaggggctgtggatagcactgtgaaggtttggacttgctaacaggatccaggccaggctgtggtttcccctgaaccagccctggacctttctgagccaggctggccacatggggtggtctcggggtttctgcctgccccgtgggcataggtggacaggctctggcagccgggcagtgccctccccgtcccatgctcggcgagcctccctctactcggcactgtccttgctgcccagcccctctctgggtgccaggtacgacgcttgccccggcccaccctccatccccaccctccatccccaccctagatggagcgagggcctttttactcaccttttctaccgtttttagactgtatgtagatttggttacctcctggttgaaataaatgctccacagactgtggctgtgagtggggacagctcctcgggacaagggggctgtgtgtggccttgaggttggtgtgcacaggcactggctgctgtgagtgggggggcatggggcagtttcctttggtggaccccaggacttcggcccactccggggcctcccctccctgctaggaggcaactcgtcacacccaagctgctggcctccagtcccatctcccccaacacatgtgcccccaaaaagtgagccaggcacctctgtttcctgctgtttattgacagccgacggcagcgccttgcccagacctcccctgcccacctgctggagcccagcctgtgccgccctctgaggagaggcctggggggacagctgggcacgtccactcgcagggaaacacggggtgagacagcaggaaggggccctgcacgccgggacgccacctccgccagccgcctccacccgccccacaccacaatcgctggttttcggcattttttaaattttttttttaagaaacgtcaaagttgtgcccaacactgtggatcagcaaacacgatagaggagaccagtcagtacttcttggagggggcaggaggagagaggaaaagggagggcgagaatgaccacacaacacagccttggaccatgagcagaagcgtccgtgggaactccactggggtggatgggctgcctgcacagcccctggagagggggccaggcacaccctcagaggagctgcaagcccgtggcctggcctgctacatgccctgcttccacgtggctgccacgctgacacacccacattcaccaaacccacccgcgccctgggacgcagccacgccaggaggaggacacggccgccgagagcaaggcacaacctcgagttcttggggcgcagagaacttaggagagaagcacggaggagcccccggcagagcacccgcccccgggccccagccttccacctgtgctagcagcctggggcctccactctggccggaggaaggaccgcaggcagacagcctgggcctctaacagcttttgtccggagctagacttcgtgtcctttcagttggtaaatggttttctatagaatcaataatatttctttctttaaatatatatttgttaaagttatacctttttgtttctctggggaaatccgcctcagctcattcccaataaattaatactcttgatagctta

SEQ ID NO: 144 - protein, 631 aa, Homo sapiens
MSSGKSARYNRFSGGPSNLPTPDVTTGTRMETTFGPAFSAVTTITKADGTSTYKQHCRTPSSSSTLAYSPRDEEDSMEPLVFAEQPSVKLCCQLCCSVFKDPVITTCGHTFCRRCALKSEKCPVDNVKLTVVVNNIAVAEQIGELFIHCRHGCRVAGSGKPPIFEVDPRGCPFTIKLSARKDHEGSCDYRPVRCPNNPSCPPLLRMNLEAHLKECEHIKCPHSKYGCTFIGNQDTYETHLETCRFEGLKEFLQQTDDRFHEMHVALAQKDQEIAFLRSMLGKLSEKIDQLEKSLELKFDVLDENQSKLSEDLMEFRRDASMLNDELSHINARLNMGILGSYDPQQIFKCKGTFVGHQGPVWCLCVYSMGDLLFSGSSDKTIKVWDTCTTYKCQKTLEGHDGIVLALCIQGCKLYSGSADCTIIVWDIQNLQKVNTIRAHDNPVCTLVSSHNVLFSGSLKAIKVWDIVGTELKLKKELTGLNHWVRALVAAQSYLYSGSYQTIKIWDIRTLDCIHVLQTSGGSVYSIAVTNHHIVCGTYENLIHVWDIESKEQVRTLTGHVGTVYALAVISTPDQTKVFSASYDRSLRVWSMDNMICTQTLLRHQGSVTALAVSRGRLFSGAVDSTVKVWTC

SEQ ID NO: 145 - DNA, 905 bp, Homo sapiens
  CDS (280)..(675)
caacacaggggcagtctccaggacctccacaccattaacaagatgagccttgtgctcccttgggctctagagaggaagcccctctgagccctcagcccctctttcctccctctcctaaagtaatttgatcctcaggaatttgttctgccctcatctggccctggccagctctgcatttgacaaatgccaggaagaggaaactgttgagaaaacggaactactggggaaagggagggctcactgagaaccatcccggtaacccgaccgccgctggtcaccatgaaccacattgtgcaaaccttctctcctgtcaacagcggccagcctcccaactacgagatgctcaaggaggagcaggaagtggctatgctgggggcgccccacaaccctgctcccccgacgtccaccgtgatccacatccgcagcgagacctccgtgcctgaccatgtcgtctggtccctgttcaacaccctcttcatgaacacctgctgcctgggcttcatagcattcgcctactccgtgaagtctagggacaggaagatggttggcgacgtgaccggggcccaggcctatgcctccaccgccaagtgcctgaacatctgggccctgattttgggcatcttcatgaccattctgctcgtcatcatcccagtgttggtcgtccaggcccagcgatagatcaggaggcatcattgaggccaggagctctgcccgtgacctgtatcccacgtactctatcttccattcctcgccctgcccccagaggccaggagctctgcccttgacctgtattccacttactccaccttccattcctcgccctgtccccacagccgagtcctgcatcagccctttatcctcacacgcttttctacaatggcattcaataaagtgtatatgtttct

SEQ ID NO: 146 - protein, 132 aa, Homo sapiens [sequence omitted]

SEQ ID NO: 147 - DNA, 905 bp, Homo sapiens
  CDS (280)..(675)
caacacaggggcagtctccaggacctccacaccattaacaagatgagccttgtgctcccttgggctctagagaggaagcccctctgagccctcagcccctctttcctccctctcctaaagtaatttgatcctcaggaatttgttctgccctcatctggccctggccagctctgcatttgacaaatgccaggaagaggaaactgttgagaaaacggaactactggggaaagggagggctcactgagaaccatcccggtaacccgaccgccgctggtcaccatgaaccacattgtgcaaaccttctctcctgtcaacagcggccagcctcccaactacgagatgctcaaggaggagcaggaagtggctatgctgggggcgccccacaaccctgctcccccgacgtccaccgtgatccacatccgcagcgagacctccgtgcctgaccatgtcgtctggtccctgttcaacaccctcttcatgaacacctgctgcctgggcttcatagcattcgcctactccgtgaagtctagggacaggaagatggttggcgacgtgaccggggcccaggcctatgcctccaccgccaagtgcctgaacatctgggccctgattttgggcatcttcatgaccattctgctcatcatcatcccagtgttggtcgtccaggcccagcgatagatcaggaggcatcattgaggccaggagctctgcccgtgacctgtatcccacgtactctatcttccattcctcgccctgcccccagaggccaggagctctgcccttgacctgtattccacttactccaccttccattcctcgccctgtccccacagccgagtcctgcatcagccctttatcctcacacgcttttctacaatggcattcaataaagtgtatatgtttct

SEQ ID NO: 148 - protein, 132 aa, Homo sapiens [sequence omitted]

SEQ ID NO: 149 - DNA, 3864 bp, Homo sapiens
  CDS (297)..(2306)
ggtgactggctgtgactcaggacccagaggagtagagggagccaggcaggggtccctccacctcggggaagagctggatgggctcttcgggagctcagaaaggctaagccttgagggacggtgacgcagagccgcctgcctgcccgggcctctgcatacctgggatcggggtgaaggacctttgcctcctagaggcctgcctgagccggggctggtggtggaaggctgctgcggcggccccacggtgccccacagcaggaggtgcttcccaaggaccgtagatgcctctctagagcatgagctcaggcaagagtgcccgctacaaccgcttctccggggggcccagcaatcttcccaccccagacgtcaccacagggaccagaatggaaacgaccttcggacccgccttttcagccgtcaccaccatcacaaaagctgacgggaccagcacctacaagcagcactgcaggacaccctcctcctccagcacccttgcctactccccgcgggacgaggaggacagcatgccccccatcagcactccccgccgctccgactccgccatctctgtccgctccctgcactcagagtccagcatgtctctgcgctccacattctcactgcccgaggaggaggaggagccggagccactggtgtttgcggagcagccctcggtgaagctgtgctgtcagctctgctgcagcgtcttcaaagaccccgtgatcaccacgtgtgggcacacgttctgtaggagatgcgccttgaagtcagagaagtgtcccgtggacaacgtcaaactgaccgtggtggtgaacaacatcgcggtggccgagcagatcggggagctcttcatccactgccggcacggctgccgggtagcgggcagcgggaagccccccatctttgaggtggacccccgagggtgccccttcaccatcaagctcagcgcccggaaggaccacgagggcagctgtgactacaggcctgtgcggtgtcccaacaaccccagctgccccccgctgctcaggatgaacctggaggcccacctcaaggagtgcgagcacatcaaatgcccccactccaagtacgggtgcacgttcatcgggaaccaggacacttacgagacccacctggagacttgccgcttcgagggcctgaaggagtttctgcagcagacggatgaccgcttccacgagatgcacgtggctctggcccagaaggaccaggagatcgccttcctgcgctccatgctgggaaagctctcggagaagatcgaccagctagagaagagcctggagctcaagtttgacgtcctggacgaaaaccagagcaagctcagcgaggacctcatggagttccggcgggacgcatccatgttaaatgacgagctgtcccacatcaacgcgcggctgaacatgggcatcctaggctcctacgaccctcagcagatcttcaagtgcaaagggacctttgtgggccaccagggccctgtgtggtgtctctgcgtctactccatgggtgacctgctcttcagtggctcctctgacaagaccatcaaggtgtgggacacatgtaccacctacaagtgtcagaagacactggagggccatgatggcatcgtgctggctctctgcatccaggggtgcaaactctacagcggctctgcagactgcaccatcattgtgtgggacatccagaacctgcagaaggtgaacaccatccgggcccatgacaacccggtgtgcacgctggtctcctcacacaacgtgctcttcagcggctccctgaaggccatcaaggtctgggacatcgtgggcactgagctgaagttgaagaaggagctcacaggcctcaaccactgggtgcgggccctggtggctgcccagagctacctgtacagcggctcctaccagacaatcaagatctgggacatccgaacccttgactgcatccacgtcctgcagacgtctggtggcagcgtctactccattgctgtgacaaatcaccacattgtctgtggcacctacgagaacctcatccacgtgtgggacattgagtccaaggagcaggtgcggaccctcacgggccacgtgggcaccgtgtatgccctggcggtcatctcgacgccagaccagaccaaagtcttcagtgcatcctacgaccggtccctcagggtctggagtatggacaacatgatctgcacgcagaccctgctgcgtcaccagggcagtgtcaccgcgctggctgtgtcccggggccgactcttctcaggggctgtggatagcactgtgaaggtttggacttgctaacaggatccaggccaggctgtggtttcccctgaaccagccctggacctttctgagccaggctggccacatggggtggtctcggggtttctgcctgccccgtgggcataggtggacaggctctggcagccgggcagtgccctccccgtcccatgctcggcgagcctccctctactcggcactgtccttgctgcccagcccctctctgggtgccaggtacgacgcttgccccggcccaccctccatccccaccctccatccccaccctagatggagcgagggcctttttactcaccttttctaccgtttttagactgtatgtagatttggttacctcctggttgaaataaatgctccacagactgtggctgtgagtggggacagctcctcgggacaagggggctgtgtgtggccttgaggttggtgtgcacaggcactggctgctgtgagtgggggggcatggggcagtttcctttggtggaccccaggacttcggcccactccggggcctcccctccctgctaggaggcaactcgtcacacccaagctgctggcctccagtcccatctcccccaacacatgtgcccccaaaaagtgagccaggcacctctgtttcctgctgtttattgacagccgacggcagcgccttgcccagacctcccctgcccacctgctggagcccagcctgtgccgccctctgaggagaggcctggggggacagctgggcacgtccactcgcagggaaacacggggtgagacagcaggaaggggccctgcacgccgggacgccacctccgccagccgcctccacccgccccacaccacaatcgctggttttcggcattttttaaattttttttttaagaaacgtcaaagttgtgcccaacactgtggatcagcaaacacgatagaggagaccagtcagtacttcttggagggggcaggaggagagaggaaaagggagggcgagaatgaccacacaacacagccttggaccatgagcagaagcgtccgtgggaactccactggggtggatgggctgcctgcacagcccctggagagggggccaggcacaccctcagaggagctgcaagcccgtggcctggcctgctacatgccctgcttccacgtggctgccacgctgacacacccacattcaccaaacccacccgcgccctgggacgcagccacgccaggaggaggacacggccgccgagagcaaggcacaacctcgagttcttggggcgcagagaacttaggagagaagcacggaggagcccccggcagagcacccgcccccgggccccagccttccacctgtgctagcagcctggggcctccactctggccggaggaaggaccgcaggcagacagcctgggcctctaacagcttttgtccggagctagacttcgtgtcctttcagttggtaaatggttttctatagaatcaataatatttctttctttaaatatatatttgttaaagttatacctttttgtttctctggggaaatccgcctcagctcattcccaataaattaatactcttgatagctta

SEQ ID NO: 150 - protein, 670 aa, Homo sapiens
MSSGKSARYNRFSGGPSNLPTPDVTTGTRMETTFGPAFSAVTTITKADGTSTYKQHCRTPSSSSTLAYSPRDEEDSMPPISTPRRSDSAISVRSLHSESSMSLRSTFSLPEEEEEPEPLVFAEQPSVKLCCQLCCSVFKDPVITTCGHTFCRRCALKSEKCPVDNVKLTVVVNNIAVAEQIGELFIHCRHGCRVAGSGKPPIFEVDPRGCPFTIKLSARKDHEGSCDYRPVRCPNNPSCPPLLRMNLEAHLKECEHIKCPHSKYGCTFIGNQDTYETHLETCRFEGLKEFLQQTDDRFHEMHVALAQKDQEIAFLRSMLGKLSEKIDQLEKSLELKFDVLDENQSKLSEDLMEFRRDASMLNDELSHINARLNMGILGSYDPQQIFKCKGTFVGHQGPVWCLCVYSMGDLLFSGSSDKTIKVWDTCTTYKCQKTLEGHDGIVLALCIQGCKLYSGSADCTIIVWDIQNLQKVNTIRAHDNPVCTLVSSHNVLFSGSLKAIKVWDIVGTELKLKKELTGLNHWVRALVAAQSYLYSGSYQTIKIWDIRTLDCIHVLQTSGGSVYSIAVTNHHIVCGTYENLIHVWDIESKEQVRTLTGHVGTVYALAVISTPDQTKVFSASYDRSLRVWSMDNMICTQTLLRHQGSVTALAVSRGRLFSGAVDSTVKVWTC

SEQ ID NO: 151 - DNA, 3253 bp, Homo sapiens
  CDS (9)..(2588)
gagggaagatggcacctgccggctgctgctgctgctgctgcttctggggcggcgctgtggccgccgcgggcgccgcccggcgtgtcctgctgctgctgctgctgggggtcctgtccgctgggctgcggccaggcgccctggccaccgagcactactcgccgctctccctgctcaagcaggagctgcagcaccggcagcagcaggaggccccggcgggcggcggcggctgcagcccgcagtccggggactggggggaccagtactctgccgagtgcggcgagtcatcctttttgaacttccatgactcagactgcgaacccaagggatcatcaccctgtgactccttgctttccctcaacactgagaagattctgagccaggccaagtctattgcagaacagaagagattcccgtttgccactgataatgacagcacaaatgaagagttagctattgcttatgtcttgattggcagtggtctgtatgatgaagcaatacggcatttttcaacaatgcttcaggaggagcctgatctggttagtgcaatttatggccgagggatagcctatggaaagaagggactacatgacattaagaatgctgagcttgctctgttcgaactgagccgagtaattaccttggaaccagatcgtccagaggtatttgagcagcgagcagaaattctgtcccctctgggacgaattaatgaagcagtgaatgacctcactaaagctatccaactgcagccctcagcacggctgtacagacatcggggaaccctgtacttcatatcagaggactatgcaacagcccatgaagactttcagcagtccttagaactgaacaaaaaccagcctatagctatgctatacaaaggtttaactttctttcacagaggacttctgaaggaagctattgaatccttcaaagaagctttgaagcagaaagttgactttattgatgcatataaaagtctagggcaggcatatagagaactgggcaattttgaagcagccactgagagctttcaaaaggcactgttgctcaaccaaaatcatgtgcaaaccctccagctccggggaatgatgctctaccaccacggcagcttacaggaagcccttaagaactttaagcggtgtctgcagctagagccatataatgaagtgtgccagtatatgaaagggctcagccatgttgccatgggacagttttatgaagggataaaagcacaaacaaaagttatgctgaatgatcctctcccaggccagaaggctagccctgagtatcttaaagtaaagtatctccgagagtactctcgacatcttcatgcacaccttgataccccccttacggaatataacattgatgtggatctgcctggaagctttaaggaccactgggctaaaaatttgcctttcctcatagaagactacgaagagcagccagggttgcaaccccacataaaagatgtgttacatcagaattttgagagttataagcctgaagtacaggagctgatttgtgtggctgatcgtttgggatccctgatgcaatatgaaacacctggtttcctgccaaacaagagaatacacagagctatgggtttggccgcattggaggtcatgcaagccgtgcagcgtacatggaccaactcgaaagttcgaatgaatgggaagacacggttgatgcagtggagagacatgtttgacattgcagttaaatggagaaggattgctgacccagaccagcccgtgctgtggttagatcaaatgccagcacgaagtcttagcagaggttttaacaaccacattaatttaatcaggggtcaggtgatcaacatgagatacctagaatattttgagaaaatacttcattttattaaagacagaattcttgtttatcatggagctaataatcctaaaggattgctggaagttcgggaagccctggaaaaggtacacaaagtagaagaccttcttccgattatgaagcagtttaatactaaaacgaaggatgggttcaccgtgaacacaaaagttcccagccttaaagaccaagggaaggaatatgatggattcacaatcacgattacaggagacaaagttggcaatatattattttctgtggaaactcaaaccacggaagaaaggacacaattatatcatgctgaaatagatgcactttataaagatttgacagcaaaaggaaaagtattgattctttcatcagaatttggggaggctgatgctgtctgcaacttaatcttatccttagtttattacttttataatttaatgccactctctcgaggatccagtgtaattgcttactcggtcatcgtgggagcactgatggcaagtggaaaagaagtagcaggaaaaattcccaaagggaagttagtcgactttgaagctatgacagcccctggttcagaggcctttagcaaagtcgccaaaagctggatgaacttgaaaagtatttcaccttcttataagactcttccatcagtttcagaaacgtttccaacgttaagatcgatgattgaggtgctaaacacagactcttctccacgttgtcttaagaaactctagttctgctgctgtatttatacaagtaaagggccggacctcttgcttcttaagttattttttaaaacatggaattataaagaaattaggtcctctattacttttgataccaatttttataggaattgaatacttgaaatcattttctttacttttctgaaccataatgaaaatcatgaaagaggctttcggggggaaaaagctacttgacttggagggaaagcgtatgtattagccggcagcctgttggttcccacttataaagtcatataactccttccttacagtaaaaaaaattttcctcaacaactaaaatataatactgaagatgaacaaaaacaaaaccaaataggagtgtttgtattcctttagagatctggatatttttcaaagacttgctttttacgcacattgtgatagagcatcttttgttgactcacgtaacctccatgtgtgggtcctttgttttattagaaccatggaagaaggttcctgggccatcagtatgtgttgcagagctcacagccaggaacacttattttgaacaatgcagacagtacttgccagagtcccaaatgctgaattattgaaccatgttttttttttcctttgttgaaaaaaataaaccagggtgatttctataaatcaccagtttttggcattgg

SEQ ID NO: 152 - protein, 860 aa, Homo sapiens
MAPAGCCCCCCFWGGAVAAAGAARRVLLLLLLGVLSAGLRPGALATEHYSPLSLLKQELQHRQQQEAPAGGGGCSPQSGDWGDQYSAECGESSFLNFHDSDCEPKGSSPCDSLLSLNTEKILSQAKSIAEQKRFPFATDNDSTNEELAIAYVLIGSGLYDEAIRHFSTMLQEEPDLVSAIYGRGIAYGKKGLHDIKNAELALFELSRVITLEPDRPEVFEQRAEILSPLGRINEAVNDLTKAIQLQPSARLYRHRGTLYFISEDYATAHEDFQQSLELNKNQPIAMLYKGLTFFHRGLLKEAIESFKEALKQKVDFIDAYKSLGQAYRELGNFEAATESFQKALLLNQNHVQTLQLRGMMLYHHGSLQEALKNFKRCLQLEPYNEVCQYMKGLSHVAMGQFYEGIKAQTKVMLNDPLPGQKASPEYLKVKYLREYSRHLHAHLDTPLTEYNIDVDLPGSFKDHWAKNLPFLIEDYEEQPGLQPHIKDVLHQNFESYKPEVQELICVADRLGSLMQYETPGFLPNKRIHRAMGLAALEVMQAVQRTWTNSKVRMNGKTRLMQWRDMFDIAVKWRRIADPDQPVLWLDQMPARSLSRGFNNHINLIRGQVINMRYLEYFEKILHFIKDRILVYHGANNPKGLLEVREALEKVHKVEDLLPIMKQFNTKTKDGFTVNTKVPSLKDQGKEYDGFTITITGDKVGNILFSVETQTTEERTQLYHAEIDALYKDLTAKGKVLILSSEFGEADAVCNLILSLVYYFYNLMPLSRGSSVIAYSVIVGALMASGKEVAGKIPKGKLVDFEAMTAPGSEAFSKVAKSWMNLKSISPSYKTLPSVSETFPTLRSMIEVLNTDSSPRCLKKL

SEQ ID NO: 153 - DNA, 3080 bp, Homo sapiens
  CDS (22)..(2439)
gcacatgcgccttgagggaagatggcacctgccggctgctgctgctgctgctgcttctggggcggcgctgtggccgccgcgggcgccgcccggcgtgtcctgctgctgctgctgctgggggtcctgtccgcccggctgcggccaggcgccctggccaccgagcactactcgccgctctccctgctcaagcaggagctgcagcaccggcagcagcaggaggccccggcgggcggcggcggctgcagcccgcagtccggggactggggggaccagtactctgccgagtgcggcgagtcatcctttttgaacttccatgactcagactgcgaacccaagggatcatcaccctgtgactccttgctttccctcaacactgagaagattctgagccaggccaagtctattgcagaacagaagagattcccgtttgccactgataatgacagcacaaatgaagagttagctattgcttatgtcttgattggcagtggtctgtatgatgaagcaatacggcatttttcaacaatgcttcagattctgtcccctctgggacgaattaatgaagcagtgaatgacctcactaaagctatccaactgcagccctcagcacggctgtacagacatcggggaaccctgtacttcatatcagaggactatgcaacagcccatgaagactttcagcagtccttagaactgaacaaaaaccagcctatagctatgctatacaaaggtttaactttctttcacagaggacttctgaaggaagctattgaatccttcaaagaagctttgaagcagaaagttgactttattgatgcatataaaagtctagggcaggcatatagagaactgggcaattttgaagcagccactgagagctttcaaaaggcactgttgctcaaccaaaatcatgtgcaaaccctccagctccggggaatgatgctctaccaccacggcagcttacaggaagcccttaagaactttaagcggtgtctgcagctagagccatataatgaagtgtgccagtatatgaaagggctcagccatgttgccatgggacagttttatgaagggataaaagcacaaacaaaagttatgctgaatgatcctctcccaggccagaaggctagccctgagtatcttaaagtaaagtatctccgagagtattctcgatatcttcatgcacaccttgataccccccttacggaatataacattgatgtggatctgcctggaagctttaaggaccactgggctaaaaatttgcctttcctcatagaagactacgaagagcagccagggttgcaaccccacataaaagatgtgttacatcagaattttgagagttataagcctgaagtacaggagctgatttgtgtggctgatcgtttgggatccctgatgcaatatgaaacacctggtttcctgccaaacaagagaatacacagagctatgggtttggccgcattggaggtcatgcaagccgtgcagcgtacatggaccaactcgaaagttcgaatgaatgggaagacacggttgatgcagtggagagacatgtttgacattgcagttaaatggagaaggattgctgacccagaccagcccgtgctgtggttagatcaaatgccagcacgaagtcttagcagaggttttaacaaccacattaatttaatcaggggacaggtgatcaacatgagatacctagaatattttgagaaaatacttcattttattaaagacagaattcttgtttatcatggagctaataatcctaaaggattgctggaagttcgggaagccctggaaaaggtacacaaagtagaagaccttcttccgattatgaagtttaatactaaaacgaaggatgggttcaccgtgaacacaaaagttcccagccttaaagaccaagggaaggaatatgatggattcacaatcacgattacaggagacaaagttggcaatatattattttctgtggaaactcaaaccacggaagaaaggacacaattatatcatgctgaaatagatgcactttataaagatttgacagcaaaaggaaaagtattgattctttcatcagaatttggggaggctgatgctgtctgcaacttaatcttatccttagtttattacttttataatttaatgccactctctcgaggatccagtgtaattgcttactcggtcatcgtgggagcactgatggcaagtggaaaagaagtagcaggaaaaattcccaaagggaagttagtcgactttgaagctatgacagcccctggttcagaggcctttagcaaagtcgccaaaagctggatgaacttgaaaagtatttcaccttcttataagactcttccatcagtatcagaaacgtttccaacgttaagatcgatgattgaggtgctaaacacagactcttctccacgttgtcttaagaaactctagttctgctgctgtatttatacaagtaaagggccggacctcttgcttcttaagttattttttaaaacatggaattataaagaaattaggtcctctattacttttgataccaatttttataggaattgaatacttgaaatcattttctttacttttctgaaccataatgaaaatcatgaaagaggctttcggggggaaaaagctacttgacttggagggaaagcgtatgtattagccggcagcctgttggttcccacttataaagtcatataactccttccttacagtaaaaaaaattttcctcaacaactaaaatataatactgaagatgaacaaaaacaaaaccaaataggagtgtttgtattcctttagagatctggatatttttcaaagacttgctttttacgcacattgtgatagagcatcttttgttgactcacgtaacctccatgtgtgggtcctttgttttattagaaccatggaagaaggttcctgggccatcagtatgtgttgcagagctcacagccaggaacacttattttgaacaatgcagacagtacttgccagagtcccaaatgctgaattattgaaccatgtttttttttcctttgttgaaaaaaataaaccagggtgatttctat

SEQ ID NO: 154 - protein, 806 aa, Homo sapiens [sequence omitted]

SEQ ID NO: 155 - DNA, 20 bp, Artificial Sequence
  Primer
cttctgctctaaaagctgcg

SEQ ID NO: 156 - DNA, 20 bp, Artificial Sequence
  Primer
cgacctgcagctcgagcaca
